United States Patent Application Publication US 2022/0211063 A1 - sequence listing, part 36

SEQ ID NO: 104 - DNA, 7752769 bp, Penicillium roqueforti (residues 3,876,387-5,814,579 of 7,752,769)
  misc_feature (471)..(2988): n is a, c, g, or t
  misc_feature (125072)..(125245): n is a, c, g, or t
  misc_feature (177032)..(177807): n is a, c, g, or t
  misc_feature (384131)..(384321): n is a, c, g, or t
  misc_feature (555855)..(555880): n is a, c, g, or t
  misc_feature (601269)..(601369): n is a, c, g, or t
  misc_feature (676760)..(677104): n is a, c, g, or t
  misc_feature (719500)..(719699): n is a, c, g, or t
  misc_feature (1142715)..(1142932): n is a, c, g, or t
  misc_feature (1186263)..(1186885): n is a, c, g, or t
  misc_feature (1335746)..(1335917): n is a, c, g, or t
  misc_feature (1623895)..(1624083): n is a, c, g, or t
  misc_feature (1638049)..(1638216): n is a, c, g, or t
  misc_feature (1653229)..(1653350): n is a, c, g, or t
  misc_feature (1825533)..(1825713): n is a, c, g, or t
  misc_feature (2226341)..(2226489): n is a, c, g, or t
  misc_feature (2393331)..(2393497): n is a, c, g, or t
  misc_feature (2448034)..(2448172): n is a, c, g, or t
  misc_feature (2535309)..(2535422): n is a, c, g, or t
  misc_feature (2536982)..(2537204): n is a, c, g, or t
  misc_feature (2854127)..(2854165): n is a, c, g, or t
  misc_feature (2984530)..(2984779): n is a, c, g, or t
  misc_feature (3020832)..(3020991): n is a, c, g, or t
  misc_feature (3033668)..(3034045): n is a, c, g, or t
  misc_feature (3159261)..(3159382): n is a, c, g, or t
  misc_feature (3215495)..(3215760): n is a, c, g, or t
  misc_feature (3224555)..(3224857): n is a, c, g, or t
  misc_feature (3317439)..(3317719): n is a, c, g, or t
  misc_feature (3542087)..(3542262): n is a, c, g, or t
  misc_feature (3623094)..(3671593): n is a, c, g, or t
  misc_feature (3674133)..(3676169): n is a, c, g, or t
  misc_feature (3690943)..(3691177): n is a, c, g, or t
  misc_feature (3731688)..(3731946): n is a, c, g, or t
  misc_feature (3989072)..(3989247): n is a, c, g, or t
  misc_feature (3992031)..(3992142): n is a, c, g, or t
  misc_feature (4101392)..(4101829): n is a, c, g, or t
  misc_feature (4338949)..(4339078): n is a, c, g, or t
  misc_feature (4339456)..(4339760): n is a, c, g, or t
  misc_feature (4384123)..(4384285): n is a, c, g, or t
  misc_feature (4533763)..(4533989): n is a, c, g, or t
  misc_feature (4697083)..(4697253): n is a, c, g, or t
  misc_feature (4793877)..(4796592): n is a, c, g, or t
  misc_feature (4802191)..(4802563): n is a, c, g, or t
  misc_feature (5082556)..(5082699): n is a, c, g, or t
  misc_feature (5096738)..(5096894): n is a, c, g, or t
  misc_feature (5239486)..(5239624): n is a, c, g, or t
  misc_feature (5277839)..(5278023): n is a, c, g, or t
  misc_feature (5381237)..(5381436): n is a, c, g, or t
  misc_feature (5479330)..(5479761): n is a, c, g, or t
  misc_feature (5512321)..(5512517): n is a, c, g, or t
  misc_feature (5631252)..(5631339): n is a, c, g, or t
  misc_feature (5721734)..(5721958): n is a, c, g, or t
  misc_feature (5728851)..(5728996): n is a, c, g, or t
  misc_feature (5774044)..(5774133): n is a, c, g, or t
  misc_feature (5808510)..(5808554): n is a, c, g, or t
  misc_feature (5832986)..(5833103): n is a, c, g, or t
  misc_feature (5846543)..(5846734): n is a, c, g, or t
  misc_feature (5859671)..(5864392): n is a, c, g, or t
  misc_feature (5865373)..(5948372): n is a, c, g, or t
  misc_feature (5948953)..(5949387): n is a, c, g, or t
  misc_feature (6008441)..(6008529): n is a, c, g, or t
  misc_feature (6324411)..(6325132): n is a, c, g, or t
  misc_feature (6373261)..(6373621): n is a, c, g, or t
  misc_feature (6805627)..(6805629): n is a, c, g, or t
  misc_feature (6847060)..(6848075): n is a, c, g, or t
  misc_feature (6999759)..(6999891): n is a, c, g, or t
  misc_feature (7043521)..(7047328): n is a, c, g, or t
  misc_feature (7057075)..(7057580): n is a, c, g, or t
  misc_feature (7108482)..(7109253): n is a, c, g, or t
  misc_feature (7114390)..(7115078): n is a, c, g, or t
  misc_feature (7152168)..(7152363): n is a, c, g, or t
  misc_feature (7347495)..(7347601): n is a, c, g, or t
  misc_feature (7355758)..(7355762): n is a, c, g, or t
  misc_feature (7379240)..(7379514): n is a, c, g, or t
  misc_feature (7441661)..(7441886): n is a, c, g, or t
  misc_feature (7525010)..(7525129): n is a, c, g, or t
  misc_feature (7750626)..(7752539): n is a, c, g, or t
ggagaaggcattggaattcggtaatttgtagcatggttacggcgtagtgtgaactagagatacttcgtgttgattgtagctccactgttcggagtactccgtagttgttattgccacgccaggagtggggttgaaaattgtgtcgacttgcagggtagtacacttcaaccctgtcgatttagacccccttaatatcggaatccttaatgtcggaatcagcacttcgtatgttgtactatatttacaatcttgctggccagaattaattagcttataatagggcacaaaggcctaggcccagaaatgtgaacttgtggaatagggctcactacccacgtgatctgttatattgtccttcactctttctttatttaaataccaaccagtaatatcttgtatcttgtaaagaattaataaaagataccttactttactggacaaccttggaattaaatcaacggggtttgggtcttgactgtgtattggcccgtggatctactggttcaccggctccactctccggggcccgggggccgagcccctgcgcacgctcccctcggtaaatcgggcattgttgtacggagaacttccgtactcagaatctcagcttgaccaacacgcccagactcgagaatctcttcccacagataaagtgcggagtatttcggagatagtttcctttcgaatcaatcaactgcaaaatcaatgattagctcgctcagtaccaggcacaccttgctttggcgggacaagactccttgcatgagaaggatgcatgattgggactgactgtagattgaaaaccccgttgtctgattggcatcttgtcttcttcctctttgccatcactctcactatgacccccctcatacccctcgccctgctcagcctcatctcctacttcatatactaccatgttataaagccctacttcctctctccactctcttccatccccaatgctcacttcacgtcacccatctccagcggctggattgaccgcaagcgcagcacaagcacggaagtcctcgccatctacgccctacaccaaaagcacggccccattgtccgtctcggcccaaaggagctgagtgtcaattctctccaaggtctgaagataatatataccggcgctttcgagaaacatccgttctacaacgatgtcttcgtcaacttcaacaccgaaaatttggtcggcatggtccacaatgcgccgcacgcgcaccaaaagcgcatgctgagcaagatttactccaagtcatatctccaggaatctagtgatctgcgggcgatctcaaaagttgtgctttgggaacgattgatgcctattctcaagaaggtgggggagggtggagaggtggtgaatgtgctgcccctcttccaggctgttggaatggactttacctcctctttcctatttggattgagacacgggacgaggtatttgtttgatattcccgagtggaagttatggttggaagagtatgagcggttcaagtatttgagtcgagacgatcggtttatggggttcattgaggggtggtgcttagggttatgcgcgggggtggaagcatctcaaaagcaggacgtcttcggcgatgaggacaaactgccatccacgaacccagtcgtctacgaccagctgcaccagagcctcctaaaccagaaggaatacgattcgcgtccgttgaacctagtagttgcgtccgaattactggaccacctaattgcaggccacgaaacgtcaggaatcaccttcacgtacatgatgtgggagctatcgcagcatccagaggttgaggccgagctgcgaaaggaacttcttaccttatcgccatccctccaatacccagccacagacggagagaaacccctccccgctccttccgcgatcgacgctctccccctgctggacgctattgtccgcgagactctccgtcttcactccccagccccaacacaactcccccgcgtgaccccaaccacagaaaaaggaacttctctgcacggatacgacagcatcccaggcggtgtgagggtcagctcaacagcctactccctccatcgcatcagcgagatctacccgcgcccgctggaatggctgcctcgacggtggatcgaggcaggagacaatattcatgacatgaggcggctgttctgggcgttcgggagcggtggacgcatgtgtctggggagtaatttcgcattgcaaggtatgcctcccgagtatgggtttcggagaacacactaatgatgcagaaatcaaattggtcatggcggctgtatattcaaattacacgacgtctattgtcgacgacgagggtattgagcaggaccacgctttcatctcgctgccacgtgggcggaagctgatgttgaggtttatcccggtctatgaatgatgcgatgcagtcatgatgatatcaaaagtaatgaaaagcttttttttaatgctttgaccatgtctcaccaacggtcttgagcacaatgtcgacttctctccgcaatttctgattgatggaggagtagagacatctggatagatcattggcgatgaaaatagtcctctaggaacgagtaactcaccttgcgtacacaactagcgccacctggttgttggtgtcaatatgaatacgctcaatatatatcattggttgtattcagcctttagcttcatattattgtttagttacatattcatgaatcaaaagatcattaaacttggttactgttattatagcattatctttcatatagaacatagtggctaatcgatcctcatgatgattaggcaagctttgattccaaagacctcaacaaactccgagccaccaagaaagccatatcggactttcttcctaggtattgaagtgcacggatcaaaaactcacaattctgccggaagcactcagtatacatcttctgatctgtgggaacatccaagttctctaccaagatatatcccgccttggcaaaacaatgaactagcacagccgtccacggttcgactaggaaggcaacttcactgagagaatcgtggaaatgatggttcatgaacgattcctgcccttgtatcgaagcccgggcaagtccaccaactgccaacgcattattcattctaagcgtagcaaccaaatgtgtagtttgtcgagcttcacgtgcaagatcagagccaagtctgcatttatcaatgctctctagtacgtccgccaaaagcatcgtggcgaggtgccagtggccgtcgaggataacataccacgactgtatgcgagacggaagcagttcatggttggtgacgcaatcaaccatgaaactctggtatgtggaatcccagtgttggcagaccaggagggtcttctggataatattttcaatatgctcgggacttgcgcctcggtagaccatagtttgaagttgtgtcacccgacggtaaaggagcactttgacaggagtcgcctctgaaagtatggatgcggcttcttcgtaggagcatggccacctcggctggatttggctcgatccctgacgttgtattgaagaccgaagaaataaatctccccagacgtcttctttcccgtgggcattgcttggaatattccaggggtcgaaattaatcggatctctgggctctcctattggcgaagttgttgaaatttgactatcctcatccgacactactaaagggcgctgatacattgcagcactcagggtatcaaacataacacctagccaaaacatcagatctagcgtagtgcggtgttcatgactagtcaggagtggatcaagtggaggctccgacggttgtggtattcccagcacattcgccgttgtctggtctatcgggcccctcccaagccctctcattttaggagcagcctcccgctgcagtctcgtgaacttgtgccggaaagtgaaaatttgacggttggcagattccaaaaatattggagcgcgatcattctctaaaagctcccccaagcttgtttcctgtcctttgtccagcggactttgtgtcaaagagaaaattatgttcgcgaaggcgatgcgaaaagacggaatactgctcgaatgctccaaagcgtgccgtgcttcgttccagactttctgtcggatcgacctctcatcattgtcgattgccgaggggaccgacgcaccggtgcccttctgcgcatgttgagcccactgcgatgcaaatgacataatcgctagatgaagcgcccgagccgcctttgtatcttcttctgcacttaacgctctgccacgtattgaggatgatactcgatccaactgacagacccgaatacacatcctgttcgaccaattcggtccccattctttcatgcctcgatcgggaaccacttgactgatcgagtcactgtaaggacagttgtgctctgtcaaccaacatgacaaagcattctccatgctgtcgtggtaaatgcggactaggttgcgcgacattgtcgcccgagcgctttgcttagctgtattttcggacgcgatgcaaaagttccattgcggtggcgtgtttgagcttcggtcagacgcagactcggacggatgtttctgtcgactcggtttccacgttgaaaccgttgatataagatcagaggtgggtgtatattcctgttgtggcaataagctgtatgtgctgccgacagaacttggtgccaaatccaaaagggcgtctgattccgcggagtctggggatccattcggcattgagttattaatttgcaaatcgtatgggatgttcatcgcccatggaaatgactgcgactggtcatcgcttgaattttgggtttggaatgactccataaagtgattttccgggtgtgacgatgatgaggacgaggcgtaatccgaggtttcaggggacccaagcaattcaggcaattctccaagatcggcgggatgcgtttgtgcagagcgcagtatctcctcaagagcttcgtcatgagagcctacgacagatgcttttgcggtgttggttttgattcgttttcgactccctctcgagtccacgcgcttggaggagatccagttgaatgtgcactcctttttccatcgtgtgcagtttgagcaagtactgaatgtgctcttttggcgatctttctaagtataaaagttagcgaccgccgtggatgacacagaaacatgttaacgaacaggtgcgtcgcagcctcttttgcccttgcgacatggatcacagctatgaagctgacgccgacgggagtcttccatgctaagctattgcatgtattattggtgagttatatgtaccggaaagaaggcagatgggtggccccgatatgcggaagaagtacgaaaggggcctccagaccaagatatttcataattcctgggggaacacgtgaactttgcagagtgcggagtgagtttaagtggggtaaaaggtaaaagtgggggagctagggcttgtatccgtccatggctcgacacgagtcatcttcggtccagaggaactgtgattggacattgctcgagtatagaatgcttcaagtagataatatctggtgtgccaggttatagaaacatctgggtctgacgtgtaaagaatccaaggctgtgaacagcactggttgacctcaggttacagcgcaggaggtggcgcattcttgcgatgacgccgatcggccaattgtctcaccgagaccgagccaatcgtataagcccaccgtcacgggatgtggtcacgggctcgcccgcagttactaaaatatcagagattgatcttcaatgtgatcgaccaattgaacgggtaggcagcgtcgtggttgtgattttacatacattaaggggtaagattttccccacagaatgcccgcccaatttatccttattctggtctgatgaaccagctctccaatcaattgatgatgtaatcaattgatatgcttggctgactgggcacggtctacaagaacttttacagtagctacgtccaagaatgatttctgcacattgcactcaatactcaatatgtagagttgattttctatggtatttacaaattggaaccaaacagctattgaaaaccttcccagcgatctgaagctcacgacttttggaggtgaacgcggactgtcttcacctccgtgtagttctccagggcgtatgatcccagctctctgccgatacctgactccttgaaaccaccgaatggcatttggtagtgaagggtgttgtagttgttaacccagacggttctattgcaagatatgttagcgaattcatgaagctcagagactagctttgcttttcaattgactcacccagccttgacagcgttggacactctgatggcagtgttaatgtttgtggtgtggacagctgcggccaagcctattttgatccgttagtcagatcatggaagtcaaatggaatgtaacatctcggagtacttaccgtagtttgtggaattggccactctgatagcctcctcctcggtggagaatttctgcaccgtgcacacaggtccaaagatctcttctttgacaatcgtcatgttctcgtcgacatcagcaaagattgtgggttgaatgtagtatccttcgctgccatgacgatcgccaccagtgacaacagtggcgccagcaccctttccgtccttaatataacccatgatccggtcatattggagctgcgagacttgcggtccctggaaggtctcggaatggaacggatctccgaccttgttctgctctgttcgcttcttgaaaagctctaggaacttgtgatagatgtcttcgtgaacaagaatgcgagagcctgcacaacagcactgtccatggttgaagaagatacccagattgacccattcgattgcatcctccaagttcgcatctgggagaatgatgttcggcgacttgccgccgagctcgagagtgactttcttcaagttactatcggctgctgccttcatgatgtgacgtccgaccagagtcgatccagtgaaagcaaccttgtcaatatccatgtgagaggcgattgctgcaccggcagttcttccgaatcctgaaataacattgaccactccaggggggaatccggcttccttgataagcttggcgacatagagcgctgaaaggggagtttgctcggctgtcttgataacaattgtatttccggtggccagagcagggccaattttccaagcgaacatcaagagcgggaagttccatggaataatttggccacagacacccactggctcgtggcgcgtgtaggtcaagctgttgctatcagtgtcgatggtttggccgtaaatcttgtcggaccagccaccatagtaccgcaggcaccctgcggagttatttacatcccctttggccattgtcactgacttgccgttatcaagtgcttcaatagcggccaatgtttcgatgtcgcgttctaggaagtctgcaagacgaagaaggagacgaccacgttcggatggcgtaattgttttccactctccattcagtgcggtacgagcagctttcacggcaatgttgacatcttcctctgcgccttcgtgcacggcgacaataggcttctcgttgtgagggttgattgtctcgaaggttctgccggccacacccttgatgaattcattgttgatgaatcttatggttttgtcagtttcttgcccaggatcattaaggtttgttaaacttacagtcccaaaggttgctcatatgtgagcacgggggtcttaatcgattggaaaagtgccatggttggaaagagaagtcggtggtatagactgaacaggatgtgagatatgggagatgtatgagaattgtgaggaaccataggcacccttatatagctgctggaaaggacccgggtggcgaaaatgatcggggtgggggagcgcggggaaagcatcgcaatcgataaaggccggtccgatgtttttcgctaattgtggggtagcaaaccccctgcctccgtttttggctgtgatgggcacttcctttcgtccggaccgctatcattcgtcgggtgttggaagcgggaaatgaagcaaccccgtcttttggtcctgtgatgaagctctcggtgtgggatacagcggtcccgaatggatcattttttggtaagatcaattatttccagctattcccacctagacaataacacaagtttaacatcttatttgagtaacggcgcatttgcatttattactagtatcatgcttctatatcaaataactttcaatctagcgggctcgtacaaagtgtaaatagttcgcctatcactgatagtcattcacgcaacacaaggcaggtactctattttgtccgcaaccgctcggtccacggctggggcgtccccgttcgataataaacttgataataagctcgtggttcccgaggttgtgtggagactagtcaaatgcaagacatagctctagaagccaaacccaacatcagcgaataatatggcaagtgtatcaacctttgaacgtcattcaaattcagtatctcaatttacaaatcccagaaatccacacctaagtctccactcctatatacagcatattctcagtccataatctgtgcctagagcacaattcaccaatcattatttactccggcatctcaagcacatagcggccggcaatcttgccttgttctgtttcgagttagcttcaagtccaaatagcagtgtgacagtgtgacatacccataagctcgaagatcttagggagatccttcagaggcgccagcttgaatggagccttaatcaagccccgggcgaagaagtcgagagcttcaacaccgtcctgttgattaccaacgtagcttcccttaatagtgatcatacgaacgacagtactaatcactggggccttgaggaatgcatctgggggcaatccgatcgcaacaattgtgcctcgggagcggacatattctgaggcttgttggaaaggcttctccgagacagccaacaagatcacggcatgagcaccaagaccatcgggagttgcggctttcacgtcggcaacaaggtccttggacttggtaaagtcgacataagtctgttttcgactttgttagcgtccatagaatgtcagggcatagagattcatgatcatacctctgtgccaagcttctcacacatctctcgcttctcctcgcctccgtcaatggcgactacgcgtagacccatggcctttgcgtactgctgtgcaagtgacccgaggccaccgcctgctccaacaatagcaactgtctggccgggacgaacgccggattccttcaggcctttataaacggtgataccagcgcagagcactggagctgctgcatcaaggggaacgcccttggggatcttagcagcattggcggcctttccgatggcgtattgctggaaggtaccatcgacagtgtatccagaaagttgcgcgtgagcgcacagaggggtatcagattgtctgcagaattcacactcggcacacgagctgttgatccacttaattccagcgtggtcaccgatctcaaaggtgttcacgagttcacccttggccacgaccactccagctccttcgtggccaccgaccaggggcatcttgacggggatgggccagtggcccatcatcgcatggtaatcggtgtggcaaacgccagagtagcgaatcttgaccagaatctgatcaggaccgggcttaggaacggggatctgtttgaggacaagtggccctccgatcttctcggcgacctgcgcccattgtgtctcggggatggacatattgatgagatgaaaaggttggaatgagttataagtgtgtggaagattgattctttggtgaattgaggattgtttgccgggcctcaattggagctttatagctaaacatgtcgggtggggatgtccggggtagtaaaaggcggggcaggacctgtcgcatcgattctcatgtttcctaccatctgaggcaattagaccgggctaccggaatgtgtcaacgatgacagaccacccggaatactgcaacgcgtagactgattgggattcagtgtgtatgatccaagaacttgaaatgcaggagaggcaatgcggggaaggtttgcggggatcgcgcacggcccgccatgcggagccgcacgggtagctactgcgattggatagatgattctcaccgaaatcctttttgtccgtttccaggaagatctcgggatcacaaatgacgtcgggactattctggcccgaaaatatggatatgcagacggtcggtggcaaatatccaagaagcttggtgcttaaccctcaaggcatcgcaagagatacatctaacatcttttgactaaatcaacgccttgcaatattggccattaggtcatcatgaataatattggtataatcatatttcgaaatttcaatgttgtacacgaaaaaaaaaaaaagaggatggcgagggggaaagtcccagaaagggcaaatctccgagaatccaacacacagggcccatctctctttctcttccagtcataaaattagcagaaccaatttgcgtatattttggttgcgctagtcagaaaccatggggttcttcttcgatcccgtggggaaagaatgtgcttgaccagccactgctgatagcaaatccggaatatggttcctcttttgcatacatatgtatctttgccaagctggttccgaagctgtcatccagagcgaggcatggcgtccccacttcactatcttcagatacgctggatgacctctctgacgacgtcgagtatgccgcatctgagaagaagggcatgaaattgtcatttcctttaaagatagttccgccacaagcttgatttccgaatttgaaactcgattgttcgtcgaaaaaggttgagtcaatgacttcatcaaagacttcttcaaatgggtcgcttctgttgtctgggatatgtctctcatcgctggcttgttgtctagttatctcgttgctataccccatattaataaggatgcaatagtgctgaagtaaagccagactgactcatagcttgtagtattcaagatattctctttttgatgctgggtttgctgcagggaagtaacaccgcgacacgagctagccttggatgctttcttcgtacctccattgaggtatttaggtggttttcgatgtccatcaacacattgtgacggcatcttgcgcttcacgcattgcccacaggggcgttcatttcctaccgcctttgtcagtttattcttctcaaactacccttgttcgagaccacaaggcggggtatccctgagcttaccgcatgttttatgggccttttggcaatacaagcaggatcttctagcctttctgcgggggcgcgggagctcgaattcagtgcgaggtgccatgttcagactagtcatcttcaatttgtgtagtgtgggatcttcaaggaaggtagataagatagtgtcacgtttgtcgatgcgacgaacttggaatcaggctttatatatacctagataaaaggttcttcacgaaggttactaacaccaagggtcctcgcaatatatggccaccaaggtgtttatcaagactacgttcatcgactgccataacaaatttgaaacgtcattctgagcggctccgcatgtttggccatcctacaacatagttctcacaatggtttagctcccttcaccagatgggaatatcggggccgtccttcagtccaaaataatgcggggaaaatcagcaagaaatgcgccgatcgtaatttcagctgtgcggctccgcatggccatttcggaaccgcatggccccgaactcaacgcgtcaaggcttggcaattggcgatgatttcccagtttcaaatccaccaacatactttttggatcatctgatctgcattccccgcaaaaagactagcaaactccttgtcatatttgtggggtcaacccccggacggaagagtttatttggcacagagtttatgtggcaacttggattcagcgaaggtagcgatcatcaaagttaaaaacctggggacatagcacatcgatacacaacattggttgaccccctgtctattttcaccggttattgtgctcactccccgttctggactcatccggtcttgctgaaaatcgagacatcccacattaaccgtctgattggacgcggtggaaaggaatgtgactgtactctccactccccctgttttacagtgaaatgagtgaatatcaattaccccgtggtgcacgtcagctacaaagtccggggaaaggttaaaggttccacagtccccgcaaattaataacaacgaggcttatctttcagagcttccattctcattacctgctatagtatattcttctactctttgaagaaaccagagagagccatgtcacatcccagcgagaacagaatggacagcttcgccagtcaaaatggcgagtcgaaggccactttccaaaacagggagaacacacaaaatgctctcactacagtcccaacgtcagtgactctgtcagcggaacaatttgaaaggctttatttgagtcctatgacggttcgccaatcatcgctagcgaagaaggttggaaatccgacaccattgtgagtctctgaatactatattctacgcacggcaattttgtctgacttgattgaacatgcagagcactaggaggttttgtcattaccaccacacccgtttcatgctgcttgatgggctggagaggagccagtggaaatggagttgctttcatgtgagaaaaccaatggatcgagagagccccatctaatgaactgaacagtggacctatcattttccttggtggtctgttgttgcttattacgagtattcttgagttcatcatcggaaatacattcccctgtgttgtgtttggcactattggtaagtcttcctatctcatgatacaagcctcgctcactagtccatgttgctgatacttcaccaaggcgggttttggtttgcgtttgcagccacgatgattccagctttcaatgcagccggtcagtttgttcagatatatcattctaccctcatgatatgagtttgctcacacttcatagctccctactcctcgtcaaccaccgatacagctgccgggctagccagcgaaagctttatgaatacctatggtaagggcaaccaagactctcaaatttgaggaatagctctgacgaaaccagcattcctattcataactatggccgttttgatgttcatcttcatgatttgtgcaacacgtatcaatgtggtatacactctcattttcctctcactgctcatggttttccttctgctgtccgcggcctattggcaactaggccaagggaatgcatctgttggtgatcggtgtgtaaaagtgagtatcattctcattatttctctgctattttgactggattctaacccgatctttctcccagggtgctggagcttcgctctttgttgctagtttactcggcttttacctgttgattgttcaactgtttgggtccatagggttcccatgcgttttgccggttggagacttggcagtactttggacccgcaatgaagacaagtgagtctcctaaaaacaatcgaatagttcgttctgacataatacaagagagcgagaggatgttgaacagccaaacgctcgctagagtcgaatcttttacggtttatctaatgttgcttgctggtatgggaagccggctgtgtcggctggctgtctcggatgtgcaagatagcttcaaccttgaaagttcttgaatcagtcagctctatcagccgcagctgttttttgtttcctttgatctcaccaggtaatattttgcgaggcgtaagtgaggcattgttaaaagtcggaggggggtgccgagtcagcttcccaaccctgcgcagattgacttgcgcatacatgtgactacttatcatatatcttagcttgtaaatctaattggtaaaatttttcgtgcattaagaaaaagcagagtactcaaataaaaggatattccgcagatgctccctcgatcagaagcaataccgttgtagtaactcacctcctttcaatcccgataatttcctatttaggaagtgtgaataacctcactatggctacttgctgtcgccgtgaaacctgccgagggagaagggcatgtctcttcataattccgcagggatgttacttggagccaaaactacaatccggtggtgcctgaaaactatatttgccactatttttgcctacaagttaagactcggttctaacatctccgtacaccttgttactccgtacatgtaactatgagccccatgcgggcccatcagtccccacatcgtagatgagtcttcatgactcatccagtcccgcccccggggcctccacaccaatcgacatatagatctcgtcttccagggatcaattaacagcccaaaacaagcttggaaactccaatccgattcccttagtgtaatacactccaaccccttgaactccaattcctcgtgaaaattctgggcgccgtgacactcacaacctcaacctcaaccatgtcaccccccacggccccaatgaccttctatgacatcgctctagcacctcctgtcacaaaatcctcctgctccccaaatccctggaaaagccgctacgccctgaacttcaaaaatgtcccctacaaaacaacctgggtacccctactcgccatcagctcggtccgcggcgctctcaacatccccgcctcgcgcaaattcgtcgacggatccccctatcaaaccctacctgttctctccgacccagctaccgggcgcacagtgggcgactccttagagatcgcgatatacctacaggaacaatacccgtcgtcgggggcgggagacttattcccggcgcaggcactggagttcgtctttgggcgggatttgggactttacgcgccgattgcagaggcgcaggtcgcggaggggcctgctgctgcgtacgcgaagtttaatacgaatgtcgatgctgtgtttagtgcgcatgcacgcctgatggcgcttggcatgccttttgatccggctgttgcggaggagtgcaaggctatgttctcgaagaggatgggtgtgccgtgggaggctttggcgcttggtggggaggagagggaggagttgttgaggtcgtttgaggagactttgggtggacttgcgaagttgtatacgaatgatgcgagtgggccgttcctgatgggaggcaaagcaaactatgcggatttcattgttggggggtggttgcgcatgagtcggggtatgttgccggtggaggagtgggaagcgttgaagggatggcatggcggtgtattcggaaggttacatgaggcgctggaagtgtttgcgcagatggactagatctggataaatggctgggtggtggatgatggatggcgttgtatactacgtattcggcccgatgcacggtttcagaaccttcataattatatacatatacatgagatatctgatagtatgtatggagtactccgtagtggtagttgagatgttgcccagacatgtgttaggcaaattctcacgtgatgtatcatgtgacatagggggttacataagactatttaattgggcgccaaaggataaggacaaacatagcgtctattgctcattgcagcggtatatatcaggccgtaacattcgttagagtaacattccctaggggccacactagaagtggtttcagcaccgaaaaacgaacggaaaagtgttccttgacgcgatctttggtctttaatccatttggccacgaagcctcctttttgtgctaccatggatcgcagaatatcaccatcagacttgaccgactcaaaccgtcttgtggaagataccatgatccatgtatttcgtgtggataacacgacggtagtaaaattatgcgacccaagtcgcctcgccgaggcagaagccatgaggttcatccgctctaaaacttccattccggttccagaggtttataacgcttatgtcgatgaaaccattggccgtggggtcattgttatggagtacattgaaggggaggttcttcgcgatgttattgaggatatggatgacacacggcgccaaaagattatctcggaattgcaaaagttcatgtccgagctacgatcaattgaaggcaattttatcggctctattgatggctcagcttgtgaggatcctgtcttttgtgccgaacagggtgggtttggcccatataaaacggagaccgaattcaatgaggggttagtccgggcaatgaccatcaaccagacgacgaactcctggattaagcatgttgcaaaactcattcgagccatgccatctcatacaacagtgctcacccacgcggacttttctccgcgaaacatcattatcagtggtgagcgggttgttggaatactcgattgggagatggccggattttatcctgagtactgggaatatatcaaggctatgtatcacccggactggcaaagtcgttgggtcgaggatgacattgtggacactgtactgaaaccattttatctcgagcatgctgtcatgttacatatgcaacaggttgtctggtgacgacttctcaaaactcgcttcaagatttagtctatctaccgacaaagaaaattgggaatattttgattgttggtaaatcccgaatgtaagtaaatgcatatctcagtcagaaacaatatatctcgcagagtcagagtagaaacagaacctcactaaaagcaaaaggaaaacgagtaaaaatgaacggaaatatgtaatcaattaccgaaaagaatagattttgaaagtgaaaagagcaaaaaccaaaagtcctattttagttgcatggctcgtatggagtaaattttcctgcatggaatgcgaaacgttccaaccttccaaggatgtgagacttggtagagccgcaaccgtggacccacccatggatgggcggcggctcgggagattagctcatccaaaatagccgctagggccacagagagccggcggaccgtgcttagtgttcttcgcgtaatggtaattcaggtattaaatccccaccgcccgggcccaccagggcttggacctccccttgttaattgaatacataactattgagcgccgtgtggtcttccatatttctccttgtcaatataagcttaatgtctagaaaaccgtatcccaccccattggttgtccagccactgagtggagagcacacacatactatcatctcgcttcatggaagaggcagtaacgctgagcgttttggtcgtgagctccttgtgtcggcaaacctacaaggccgacttcctacagtaaaatttgtctttcccactgcccgcaagcggcggtcaactatactcaagaagatcccaattcatcagtggtacgataactactcccttgaagaccctggacaaagaaccgaccttcaggtggatgggctctctcagactgctgagttcattcgcggcttagtcaccgaagaggtacggattttaggcgaggcgaatcattcaaagattatcctatgggggctgagtcaaggctgtgctgcgggtatcttcgcgcttttaggtggctggcccgacactagtgaaggaaatacactcggggcatttattgggatgagtggatggctgccatttgagcagcaactatgcgagattatccgatccgacatcaacctagtattggcggaagacaattatcaggagatgcaatcggaagacgactcatccgaggaatgtgaaagtgatgaagagttagaagcagatgtatattccgaacaagacttcagcgacaatccattggacgagagcagcccggtacacgatgactccaatcccttcaaggggctcaaggaagacagcccactgtgtggtgacttcaatccattcgaggaggacgaggaagaagctccgttggtcatccaggctatcaaccacgttcgtgacatccttgctcttcctatgattccaaacaatactcagtcatcggaagacggtgattcaacaagtttgtgtcacctccacactcctgtctttctgggccacggcgcacaagatcctaaagtctctgcgcgttttggtgaaaagatgtctcgtatgctgtcagatagtctaggaatggatgtgacatggaaggaatatcaagggctagggcattggtaccgtgttgaggacgagattgaagatattttgggctttcttcgggatcgtgtcaacctaccagtgataccagagtcacccctagagaaacagaaaggacaggagaagcaattatgagttctttgaattagatacgccaggcgacggattttaaaccgatgattaagtattccgtaaaaaccctcgtactaggttcggaaaggacatgtgctcagaagaagtctgatgctcagtcaaagatcagctctagatacagaccaaattgagccaaagagagaaaccaaaggagtgggagaggagggaactatgatatagcctgaaaaagatcgtaatttctgtattgctgagagacagatgagagtcctttaaactattcaaagcaccaaactccaaactcccctatttactaagatactaattatcataatcactatgctgagagttcttccaatttctcagctatctgctcaacgtcaaggtcacttggccttatttcaatggcctgaacttcaaccttgttgtcctctgacttggagatatctttctctccctccttctccttcgcgatgtctatatgggacagcgtatactcatctggatcccaagccagaactttgctttccatctctttaaccttttttgctacaagtagttctatctcatctttctccgtgtcacttaagagatcaagtctctgcctccacgcatcctcgacattgtccgccggtccaaagaagcgctgatcaatcttttcccaatatatcacatcgatggcacgggtggtcctcgcggcatatgcaatccaaaagtcaccactctcccaactttctcgcattggaccgagagtcgatcttcttctttcgtagccgtagcgttctcacgatcgatcatcaccttcaaaaatgtctggagccggcgatcgaacacgtttgttcagtcctcaagaccttgaggccagtgctccggtgtttcaataagaagccaccaaggcggcgcgtacgtgaactcccaatccacgacgccggtcactttagagtcattgttgacaagaacattagttggtcggaaatcatcacaccatattttgaacgggcctgtatcgaatgctacccatcgcttggtgagcttaccctcgcgggctagcttgcggaagaggtatctgccaatgaacttgcgtcgacgatcatctgcagactcgattgcgtcgtttctttgatggatgagattggcaatgtgaagttccgccagggcttcgaagtacgaagatgctgaggtaaatattgtctcgtagcttggtaattctgactgaggtagggaccctggtctaacgagttcgtttgaattcattgataaaggaaggctcgccacttcccatgtaaagtcgtcaacccgactcaatgatccgatccgagggaagtgtacttttgaaagttacaacagaatgccagctagctccccgtataatgcctgaagtgtgtcctcattgatatcggggttaagccttccccttttctcaggtgggtaatttgggatattgagaaggtcgtacatattcgtgtcatgttcgacatattccatggtaatgaaagggcccaactccaagggagactctttcttagaaccgcagtggagaatgaatggcaccgggattgaagtcgcatcatgaaggtatcgcataatgacaacctcgttccgaacctgttcttcgggaaacatagccgcaccgggtaggggaaagcgtatggtggcggcaacacctgttttgtacgacctccagaatgcgatattgtatgtaccctttcccaagagagaaaatcgaaaagggtcggttcagcgtgatatgatgatttccaatggaatgaaagacctgcttagctccttccataacatgtatgtgacggaagatatgatggttccttttctttgtcctgcagatcagcatgcagttcattatgagcagctttggtcgactttgccctctatcgagcaacctaacctcggatggaaacaggtgcatgtactacctgacactgggacaaacgtttgaagaagctattgatgtcgattgtgcgcctaaatctgtatggcgctggggttatgccatatttgatgacgaaagattgagggcatggaaagcggtttgggccacgagcccgaatttgcagtttcaattattcattttgttgtttgaatgttgactagaggtagttcatttatagtccaataccatctcatgctctaaattaagataccatcatataggctgcgtcatttagctatgagttgaacgtatcgatcagaggattcgacgtaggagccacatcatcctgcgtggcttggactattaaaagtctgaaagaaagttatagaaattataaaagcagatatgatgatcaagggataaagaggcacagctagagaagcactaggtaaggataagcaggtgtgaacaaaggaatccgaatccttggatatatacctgcgcaatatttgaatacaaagaattctcgaaaggaagtatgagttgaagagaatggcctcgctacatgaaacgactctgttcagaaattgcgggctttgatgctgctattcttgttgtcaatgaagcaattcccaatctattattggaacacgttcattgaaaacaaaaaccaccaatacctttcaccagactcattattggcattcaactcttgcttctacatcaatggtatgtggcatgtaaaaagaatcatattcgacaagcaagtccctcataatacctggcttcactcagcatatttcgcatcactcgacttcgacattaatccgccaccaattccaaataaagctacttttattttttgacgctataatctacatctacggagaatttcctgacagcgtctaacagcggtgattatggatcatctttcacggctttccaaacgcattcggggaatcgccaaggcagttgtttcgttctcatcatcaatcgtggatcatatcacactgaagcgacggtgtgaaaatgaagattctgatgaaggggatgatgatgattcggattccatcgacattgatccattcgaagcagtattggaaagagtgaaagcgaagcgtattcgtgaatacgtgacaacgattcgcgcgaagactctttcaaacgataagaagaaaattcctaacgttgaggttaagtctcctactttcataggggagcacatttgctatagggtgaagtttgccgacggagttagctggattctcaaagtcccagctatcggaacccctgatcaatttgacaaagacgatgccgagacccttcgctcggaagcattgacgatgatcatgctgcggcgcgagacaaccataccaatccccgaggtcatttcatacaacattacatgctcaaacaagctcaaagttcccttcattctcatggagttcatcgacgctcggcctttggacgaagtctggcatgaccgggaatctccgaaagaagttgtacaggctcggcgtacacgctgtctgcgggatattgctgcagcgtatatccagcttggaaaatacactttcaacgaagataggcccctgcgatttgacgacgaagattgccttataggtgttgtacccgtgaacaacgacccattctcgggcctcagagagggttgtacttctcgtctggacagatgggggaacgaggaggttgagcatcgaaaggggttgcagaagcttcttcggatgtttgtcgactggactccagagccaaatggtgggaaatcattcgttttgtcacatccaaaccccaatattttcaacttccttgtctcggaagatggttctgtgcgggcaatcctcgattggcacggcgcgcataccagttcgccgagtatagggaatgagtcgtatccactatggctgatgcgcgactgggacccgagcgtatatatatggagtgaagagatggaacaggggattcatgacgaggaaaatgtttgggaagactcaccggacacactgaagttctatcaaaatgtctatgcgcaatgtatcgcagatctgcgaccagaaagcgagaatgccaaagtgacccgaaattccgttctctttcaacatttgatgatggcgacgggagacccgatgtttagcttaggcattaccgaaaagatccttctcgaagtcatgaagcgagtggataagaatagcaacaacaaagacagcggaaactcgggttcttccaaagagcatttgacgggcgatcacagttcaccgaatgagacagaggacgcgggccatggtggtattgaagcggacatggatggagaagatgaagacgaattttttgatatttatgaatttctccagggtttgagcaaagacggcctatgtgagcaccgacagaagcttttcaagaaggggtttcaggctttatttattagttagcttcgaggttgcggtgtttgatgtatagttatgcacgatgacttcaaagaccgaagttgtcatgcattattgttgattttgatgttgaaaaggaggacaatttgaaatcagataaactctttttctttcctttgttcctagacactcttgtctcttctctagagtctagttgcacccaaaatgatatgcggttggtacaagagacacctcaggcaggaactggttatccagccacattatgtaatcaagcacgtcagccaatgaaaacatgcacactaaccgatcaagggcttagggctcacctcagtcacaccccactgccttttcgcacttgagcggcttctggacgtcgccctcttcctttgaacatccacctcatccgacaaaatggtgagttccccagcatcccaatatacaactcggaagacagaatactaatcgaaatgtgacgaacaggcgcccgcagcaacaggaggcaagaagcaaaagaagaagtggtccaagggcaagggtacgcaatcaccaaccatgcgatcgtgacgatttcggccgagttcccacaagacacgaacgaaatcgttggacgagctggggatacgcaatagcaccaagaagcaacatttactgacatgtctttcgccctacagtcaaggacaaggcccagcacgccgtcgttctcgacaaggccaccaacgacaagcttcagaaggatgtccagtcctaccgtctgatcactgtcgccacccttgtcgatcgtctcaagatcaacggcagccttgcccgccaggctctcgccgaccttgaggctaacggccagatcaagaaggtcgttggtcactccagcctgagcatctacagtacgttattcaacaccccttatccttcgaaattccaatgctgataaccttcttcaatagcccgtgccgtcaccgccgagtaaacgtctcgtctctcgtcttttctcgcggttttcttttccttgctacgaatgatatcatttaccttgggaagcccggctgggcatgatgcatagtggattaacgtctgactcttgaagggtgtggaacattcgcactcctgatatacgtcagtagtgcgaactgaatcaaaaaatctacaaaacttcatgaaaaggacatgcgtcatattccgtagacttctctcggcctctaccacctacaatttgcactatctacaccgacccagcaaaaacagtaatcctacgactcttccaccatcgcactcctcttcggccgctgctgctgcgcgctctcacacagcggcaacggctcttcatcaacacctccatcctcaaccaccctcccagcctcaaaatactttgcatgattcgcaaagaatccagtccaccgcttgacagtctcctcaacccgcgctctagcagcccgtaactccttctcacgacggattttcctctgtgcagaagtcacagcctcattctcgacatcctcaaccggcatgaacataatctcgacaccgcgcaagtcgttcgtaagatcttccttaaagcagcccgtgacaaaagctcgcgttgcgtcccgccccgcaaagaagttgtagctcccaccgggtccgtagatcatgcgattttccgagacgtcgaagacggtcccgttcaccgcgacgtacagggggagactggtgtccgtgccgttgtagagggatagttggcttggtgtcaggataacggggccttgctttattgtagaaatggatgtgttagcttgaatcaacatgaccttttcatttttttgtaaaccaaggaccgggattcgcgtaccacccactgcttcaccaccggccaccgtgtataccatggcctgtacccccacagcacggactcggaggaagtcacataatatgagagaccaccgcaggcgacgagtagggtcacaatcacgcggagtatgtctagcaggcttatgccgtggtcttggctggcttcgtcgtttatggagtgctgtccggaggtcggctctttgtcgggtccattgctggactttgacgtggctgttggtcgctggcggagttctgtcatctctcctgaatttgagttgagttgtaagatcagacaatgaccatttggattgttgtcattggagttgcacaggtggagggcttggctgacaaaacccgaggcaagtgcccagctccgagtggacttcgacttatccacaacttcacatttacaggatttggtttgattttgatcgaatatgttttatttcgcaagctgcattcgtcgctaaagatacaagaggcttgaattcatcacgcaacggagaattacacccagctttttggttcgaacgtcaagtttgcctcgatttatttcccgtcatttgcttacagctgcagattccccttcttgggccgtagacccttcttcccagctacgcgagaagacttcgttcagagcgtcttggaaagtacggcagttcatgtcaatcagacctcgcttgtccttggcttcgggattgcgaatcaccgagactagacagaggtatctgtagaatcaagtcagtatagacaataaagatacactttgagagacatacttgttcatctccatcaaatggatcatagtctgatcatgcaacaccacatggctttctgcttcttggatctggtcgcccaatcgtttacgaactgggtgatcccaagagtacaactctgagatgtcgacaatcacgtcaatataatcagagcacatctcatagcaagccatgtcaacaggtcgagtgtcggaggcgatataaatcttactcagaacatcgaagaggtatgtcttttcaaacccacaattgttggcgagggtgttgatgaggttctcaagtgtagataagttggggatcagcttctggatcactttgctgaaggcttcgaagactgagtaatcgtagatagaggtcaggtagtagtgcacgggcgcattctcgtatccagcgtcactgagctcatcggagatgcgctgcacaatgtcctggaacgtgtcggtgcggtactcgtctgacagtccatcgaccttgtgtatgaagacctcgatgttgatcccgggatagaactgctgaacggtcaatatggttcggttgagccgtgccactgagtccaggtagtcatcttgtgcgtcgatcacccaaaccagggcgcccagactgccgaagatatcttcgaggtcaaaagcggactcaaagtattcgagctgacctgggaaatcccagacttggaagtccatgaaagagctgcaaactccaggtcagcggaaagcgcatcaagcacgtctattctttcgaacttactggatcgagtccttctgaatccgggtagtcgactccaagaagagtgtctcatttggcggcatcttatggaataccacactagcaatagatgacttaccactcctagtacacagttagtatctcagttgtgcgagggctagcagagaagacttgccgtcggagtcccattagaagaagacgaggtttaacatcagggcctttggtattaggcacagaggccgatttggcctgagttggcgcagccacttgtctgcttccctgtaaaatatccagaaggcttagctcagcttcagtcttgggcaatggaatttcacgccgtcgcttccaaaaattgagctcacgtcctataaaaggaccatgaggccggctcacgcgggctgccggtgagtcggacatttaatcaaacaaaaggggtatacattttgggagaatggggaagcaagagaaagcttatggttatagggacgggagattcatgattaggggcagggtggaataaatcaacgcatcacatgttggaaaggaaaagggcattgggcagtcagcgaacccaaccaggctagtatccttggaataacaaggaaaagcccgaggctgaggacggagacaaaatgggactatcttgcaacgggcccattataacaggaaccgtgacagacgctccaaatttggaaatccgtgccttgcctttttcagggcacatttggccgcctagacaggtctctagtgattcttccggaaatagcccaagggtccgggaccaagcagctgtctcacaacggcccgtgcatggatgcagcgggacgcggtaactagccgagcttcgccggatgacctagccggggttcgatgtattatagggaatatggtgcgaggggatgtgctttgggggaaagagtttcttacctccattgaagacagatatctggatatggtatgttagaatctgggatatgcattcagaattgattgggtgtacttacggcgcaatttatttgtattgtgcagggataattagaccaacacaaggtcaaatgtcctccgtgatcacaaagaagaatggtaaaagggactagtcgagctcaatttaaggcaaagaccgactgttgacatctgcatgtgcgaatctcgcctgggaatgccgcaaggatcccagttattgactgggatggtggtacggagtcggatatctgcagtcagacctgtatcatcttcccaaggttgggaaattcaattcacggcgggagggtcggctggagcaatcgtcgagtaaccgttatgccgtttgaggagtgcgggggttggagtagctcggagctccgaggcaaggcgtagcgcgatctggcaccgacgtgcaacactcaaaccagcgcggtaggggagctaaaagagtttattttggaaaatgtaaggcttgaattgattcaaaggagtactcatgagattgtgttaaggaagagatgggggaagaggaagagcagaaccgacattcaagacggatcgttatctctgagcttctatcttatcagttctaatctgtcacagaccgcctttactattctgccacatgccacaatcaacttcataactgtcaaagaaaggtacagagtacacgcctctaacctcatttattacgcttggtcaaggctaaaaatgatgggcttcttcgacatgatattttatgcttaaatacattgatagaattgaacagaaatcactttttttatcatcaacaatcatcaacctcgacatcatgcggcaaccatccggtggttgtgtccatgagcatgtttagtcccttttttctgacccagatactcgctgatacgatgcttgccctgctccggctcctgctcttcttcttcctcttcctcttcctcgacctcaaatgcaggccattcctcccaaccatcttcccacatctttgctaacttatctgttttctcgtctctgctcattttcttgttcttcatcaccttctcccacttcttcatatctttatcatctagaagacactcatccagcagagcagtgatcttgccagtgtcaataccttcaccaatgaacactatttcctggcgacggtcgccccaggcaccttggaaatcattttggatggattcccgcacatccttgtcttctggccaagcctcatcggggagttcagcaaaccaaggcccaccgcatccaagagtcagcataccacctgcttggctccattctccaaattgccagggtctggttgtgagccagaagaagcccttggagcggagaactggaccaaaggccgggtggttacgcttattgctcataatgaccgctggatcaggctggtcaaagtcttccactgacccggagtcggagtctgtatccattgcatcttcttcctcttcttcttcgtcttcctccccgtcttcctcgtcgccttcttcttcttcaacttcattgttctggagaatgatgaacttgtcatggagaagagcaaagaggcggcgtgaatggaagggtcgacgggcagtgtagacgaagttgttgataccgtacctgtaatcgatcagtaaatgattcatgaataaagaactgacaaacttactccaaggtctctggctttggtgccaaccgctcaccattgcctgttgtctgtatcgtcatttcgtgcagactctgcagccacccaggaccagaagcagcacgcacgaaatcaaatttgtttgtgttgataatttcccggacgtctatttgggagtagtttgactcgaggatctttgcgactgggttcagcagcttgagcaaatgcatgagcttatcgcgggttgcttggtcaactgtctcgaccttattgagaatcaacacatcggcgaactcaatttgatccaccatcagatcagatatagtgcgctcatcctcggggacaatctcttccctcccatagcggtcagagaggaactctgctgtgtcgaagctggaaagcaagttgaaggcatcaataacagtgacggtagtgtctaaccgagccattgtgtgcaagccacctaggttcacactatgttgtcaaaacatgtcagcaagcccatcataagcggagatgtggtgaagaaacaatacatttcatccaggatctttcttgcttcctcatcatcattcgcaatctgatcttcagcttccaacatggccgagctaaactccgacgtgaaagtctcagccacttgcataggctcgctaatgccagtcgactcaatgatgacatagtcaacctcatttcgcttggtcagagctgccagttcagccagcaagtctccccgcagagtgcagcagatgcatccgttttgaagtcgaataagcttctcggtggtttgtgagactttgtggttttggatgagggtagcgtcgatgttcagcctaatggaacgaagcaattagcttgcatcctatattcttcgttcgatgtggaactcactggctcatgtcgttgacgatgacagcgatccttaacccatggtcaggagacttgaggatgtgtttgaggagtgtcgtcttgccgcttccctacacatggatgtcagtgtccatggacatgagtcaacgttcatacaactgctgtttcataccaggaatcccgaaagcaaggtcacgggcatctgccgtgtcttcggcttttcctccagaggagctgggacattgtaggagaccgagtctgttccagaattgatgaccatcgtgaaggtgagtgacttttatggctatgtatacaaagcaagaaagaagaaagagaaggaaaaatcaactgagtctctggaagttctatggtatcacattatatagcatctcctttcccacggcaccgtctccaagttcctcaccctctcccactgtcggttgcattttcgatgtcgtacaattgtcaatacatgtcctccaaggttgaagtataccagtggagctatctctcaaccaatgaagcgtatgatttcaaatggcgatgataattgctgtgttttaagtggccagcataaatcgcccgcaaggtacctggctggcgccgctgactttcacggtccccatttgacgagattcgttttgaaaagacagtattagggcatctgtgattggtcttttgctggtttctgggctgagtgctcgttttgaactatcgatggtggatgtacggagtagggctaaacgagctaactaggatagagctagaacgacatatttgaatctctaactagcccaaataaaaggatattgacagtataaagcttgaatgttcttcccccatatgattcttaatatcaattaatgcttcagatataacacactcagatctccaaccttctccaaatcgaaatcggcgatcggctcaatgcgcgggccgataacagccaaatcgccgatctgagaatgcgaaattgacgtcgaagaacgtataaaaggagagtcacaccgacagaatggaaaataacattcattatctctattcctcctctccaaaatgaccgacctgggaatctacaccaaacccctagcctacctaggcctcttcaccctaggaaaagccgccttctccctaacccgccaagcaacaaacttcctcctccccagcacgctctgcaaacgctacaactccacaaaagcaaactgggccctcgtcaccggcgccacagacgggatagggtttggcttcagtcaggagctctgcgcgcgcggcttcaacgtcatcctacacggccggaacgtggagaaactcgaccgtcgccgccgcgaactacaggcgctgttccccgcagtctctgttgctgttctcgtgcgcgatgcgcagaatctgactcccgatattgacgatgttgacgcggaggtgcgcgagatcattcatagcagtaatgcggcgatcggttccccgggtgaccctggcaagttgaccgttcttattaataatgtcggtggtgagatgagaccatctacgctccttaaggagtatacctttgaggatgtgcaggcgaccgtttcgcggaatgcgaccttcgctattcagattacccgtgtgctggcggaacagctggaagagaatgcgccaggtcttgttatgaatgtttcttctgttgcggcgtttggattgccgtatatcagtgcttatagctctacgaagggatttgtggattcctttacgaagtcgctgcgcgcggagttcgccgctgaagggaaggaggttgaggttatggggctgcgggttgccgaggtcaaaactgctgggtatgatgtgaagagtagcttgtttgtccctgaggcgagagtgctggcggctgctggcttggatcgggttgggtgtgggcaagagattgtatgggcctatttctggcattggttgcagggtttgtcgtttgagtatttaccgcgctggatgttgatgaagattgctgcgatgaagctgaaggcaatcagagctgatcagggggccaaggcgaagagcagctgatatggtagctgatatgttgtgcctctggctctctacttcctttctatcacaaacatattgaacagtataagatacacgggaaaatattatatctgtaatcaaacacaacagcaactacagtctatagaatgtctagaagccagccggggccttatgacgatcgtctggaccgtggagtcctgcgccaaggtccaccatgcactcgctttgccaatcctttggtgtgaacttatcgacaattgccttgaaggcgtccaaagtgcagaatgtctcatcgccaggcaagtggttctcaggcttagcagcacagccggggataaggacgggctggtcattgtagcgaatacggacatagtgcttctggagagactcgcgagcgctttcggggagggattcgagaggtgcgcgtgcagtatcggagggggtgggtagcttcggtgcggacttaccgagcaactgggaaaggataccaggcttcttgtttgcgacgggtgggttggagaactcctcgagcacgatgccagcgatggaatcggagctgggcgcttgggagaagagctcgactgcaacagaggaagtgaatggaggccatgactgattttggaatccgccaatactggacaggatggctgccaaggtggtgtcgtggcagccgctcatagcaaacttgatagccttgccagtttccgccttgcctgacccggacgcagcggactcactgcgccagccacctttcacagcggtgctgaccatgcggtcaaccacatcacccatgagagcaccaattcccagtttgcggtattcgctgctctcgccgtagccagcaaaccactcctcaaccgcaatgcggtccacgacggcacgagccttcttgtcgtagaactcggatgggagcttagtggccgggccatgggcatcggttgcgttgatggtatccatgattccggaaagacgagggtgggcatcgacagcaaccttaggcgattcttcgggcatatactttgaccaaaggctgttcaagtacgccatttgttccgagtcgttccctgcattcaaatcattagccgtgatccttatcttcatatcccactgataaacccatacatcgtgtagccgcgcggtcagcaaacagccgtgacagctgtcggaatcgcctacaattcccctcgttcgggaagagtgtctcctcattgacctgacgggccacaatcactggcggtgggaagtcaagcgtgcgcgcgctagccgggtacattccccaaaaggcctcttggagcgactccagcgcacgggggatcggcgtggcgcgcagatacatatcctcggaatcggccttgatctgaggcataaacccgagctggtccacgtataaacgacgcagccgttgtccgagcgcatatgtcgtttcacggcccttgtctgtgagctcgccgtgcaagcttcagatcggacaatttagctttactccacatacagatcatagctccaggaacttaccacatggcttcgacgggtcctcccggtcctgcagtaatcaccgactggtcatttctgccgaatgactccattttccggcgccattggaacccattccattccgagaggtctttgctgctcgatgccatctgcaccatgcgtcttgcgacaccacaatatggccagtcttgtcggggtaactgtcagcatgtactccgccgatatcggtattaggaaattagcatacatgggcttaggcctgtctttgggaagtgttagcggagaccgtcggagagcggatttggggtagtcaattgcggcatacgtttgagaatcgagacgagacaggtgtccgttcacctaggatcggttagaaatgctctcaggggtaacattgtaaatgtatatctcaccatgacggaggaactgtagtagttagctatgtttgtcaatgtggggaccaaaacacgtaccacttgcaccagctgcagcttcagggctggtgggtacaggcgagcgagctcatcctgagtataaggctcacgaggaatgagggtggtcatctcgaatcaagtggaagagagatatccagagagatctaagaatctataaaataaatttaagtcaggaaataaacggcccccaatgaaggcggtgagggagcagctgttggagtaggctataccgataagccatccatgttgacgttcattgaattatactctgtgcatttattaaatagaaaatagaagcattaagtgcggagatttattctaattatattcatcagcctctaaacatggggaaggctaggaaaagctggcaagctcctaaggatataagacccgacatatggtctccgcatctcggcaagttcgccgaagcgtactcgcctcggactagtaatctccgaggtgaagaaaagaagaaaactcttccaagctatgcatatttgacatggtataaaagtacatttaggaacaacattcctcgtggtcactcgtctcccacccctcctcgctttcactggcactccagacagatcgagtgggcaccgccgggacatcgctagtctcagtcaatgcagccgcagctgccgcagccgtagcagtagccatttgcttagccaacttcttattattcttcgccttgcgggcattctcctcttcctggcgcatcagtttcacgcgctcggattcctcgttcgccgctcgctccaagagctcgaccagcttctccaacgctggcgcatatgcctgcgcaagggcgaagtccccgaccttgatacgcatgaagtccatcgctcccgcgacggggccggtatagacgccgagcctttggcttgatgtcgtcatgttgatgtcgtcggacattggggcgtcgttgcccgctgattcatcctgggggtcgtcgaggggaatatccgcatctgcgggctcctttgcagctgcatcccggttattcgggaatttgcctggattttgcttctctacaaacgctatcttctggtagcgttggctgaaatgagtgagcaggacagcgcgcgcttgcatgcggcggccaatttcgattgcctcggaggaggtcgagtgccgtttggccctagccgatccgaccatgtcgggttggaaggtggcctcatggataagcacggtcgaaccctgtccaatggcggcaaatttatctgatggcctgcagtcaccggagtaggaaaccttaaatccatttgagaagacaagggagacggcgagcgcacccttgcagtgtttgacacggcaagtgagtatgtctgcaaggccggtggcagacttgagaagaggagtgatgggggaggattcgtccgtgaaatcaacatgaagacgatgacgattaggtagttggtgtgagaactcggtggtgattttagaaccttgtacttcgggatgcgcggaaagagtaagcaacttgtcgaacccgaagttctcgacctgtgagtattcttccaaccaggatatcattgcatcatcagacacaagtgccagccgtttctcctggaggatcttggctatatcgttttcacgtctagcagccgagccaaatccatccttgaagttctctgcgtgccaggccttgatcacagagaccgttcctaggtggtgatcagcgtgcaagtggctgatccaaatcattcgcaggttctgaagcacttcacgaagttcttcgggctcgaaaactcgcttcagttgaccaagagtattctcaccacagtcaagcagatagtagccatatccaggcacctttagcagtgtggcagagacatttcggtatttagatggaacagaagaaccagtacccagggcgatgatttctgcatccgctccaggccattgtgtccgttgttcgtgcaactttttctggaaagcaggtttagccacgcggctgctaatgacttccattctttgtgtgacagaacgcgggatgctattcaatacattcgctgggttgaagcgggtcatcacatcctcactgttgaacccgaaattgggctccatgttgatgatgaatccgggttcaagaggctgcagtggagaattctggcgagcagcaattgcagattgtgaattggcattaggtgagcccggttggggaagggtcacattgtcgtgaacaggaaccgcatagctatcgcttttcagacgggcgaggcgaacagtcgagctagcagagcaggtcaatgccaggtagttcgggcagtggtctgtgctcgacacggtgtgcttgcagtgggacatgctggcaacgaattcctggaatttaggattctcagccacgcctggtccaagaatccagatgaaggcctgcaactcggtcgtcacggctggtgatttccattcgggccggttgaccaggtcctcgacgtaatcagacgatggcaattccatgatggcaacgccttttcctgctcgcgtctgtcccaagaccatatctggagtgatagtcttgccatctagggattgaacgctctcgcccttcgtcaaagccgcgtacttagaacccttctcaacgttcaattctcgggccttcttcgggtcgaactttccgcggatatcgtggtttcgcacgatatagcagacagcctctttcgagggagaagtggttgggagactctcgatagtagcaccgggccagggctttcgaacgagcaccttgatgtctggcagctcatctgagccacccggcaccggacctttgtattgttcaaggtccttggtttctgggttgcgaatgaatatggcggccggcatcttgacctcagccaatggggtttcatggagggcatccatcttccacgttgagttaaacatatcctgcacaatagactgcgtcaccatcaagttcttagtacgttggtccatatgatctccggtctgttcagattcctggaactcgtccaagctccgctttcgtggactctgtgacaacggctgcgtaactggagaacgcgccgatgggtgaggtttaataggcagggcccagactttgatgttactgtcggaccatgatggcttctcaaagggatcctcggcgccgataggcatttgcttagcgagggtttccgagtcatattctttcaaatacaccggcatgccctttcggaaaacaaaccgtcgagacgtagccagtgtatgtgtaagattcgcagcaccatgaatggtgaggttacctcgctgcgagaccgtctcgccgtcccgctccacaagggcaggggcaggggtcctaccattttggggtgcacggggcttagattttgtattttcttcggcctcccgttccgccctgcgggcagccttctttctttgttcgtcctcaatagccgccatggaagatgccaccgtatcagcaagggtcagaacaatcccaatcaaaccgcctgtgttggcccattccgtccgtccagtgacaaagacatcggtgagaagagatagcttgatcccgcgctctgtgcatgcacgctgtgtgccttctgatacctggccgaagaagtatcgcttgtctgggaagttgaggcaaacggccgtgccgggggtatcggccgttggggtcgtgatgacctgatagaagaatttcatcggggcaattccttctaccggtataggcaatggaacgagttcgagtttggatggttcacaaatcaagtagtcgtcgttatcgggccgtcgtctgttcaaggccggggcttgaagaaagtatgcgttcgttttgattgcaggttgtctgatccgaagcggcaaggcttgctcttgcaatttctttttttccgctaattgctccaatgatttagggaaagggatggggctactggagctcggctttgagtcaccgggttttggtgagtcacggcttctggcgctgcgatacaatcgtagggtgaatggcgaaattgaggttcgagagaatgcgcgccaggcgactgcgcgagtggtcgcggttgacaggacaccgcgcacgcaagaggaagccaacttggctagaatgaggggtatcgaaatagaaatttatgataaaaggcgcgcatgtgtagtgatgtcaaggagtaggaaattggtggattccaacgtttagagaaaaaagtgacggtcaatttttcgcatggccgggcagaaaatccatctggaccgccatggagttgttcttcaaataaatagcacaacagatagctcagctagatttaagtgtagatgcgcatttaagaaatacttgtgctattaaacaagtacctgatattcaatttacatgttctagttatgtaccgggttggaacttccaacgcataccattttgacaaagtgacacgcattctatttggctaaactactacaagtatacaggctatgcaataaacaagacaatcatatggccgtaaatatcaagagttgggcttttactccacaaattctttagatacgccagtaaagtaagctccaaaattccatcaagaaggtccctcgtgggagatacacgatatagtaagagacaggcgccttgaaactcccccaggacagacaaaggaaataaaaactccctcccatgattcgcaaaatatggcaggaggtttcaccgtaggtgtatagtcacaaggcaatgacaatggcgagaaagagaatagggctcacatatacaaagaaaagaaggccgaaaaggcaggacgctaatggggaatcactgaaggtgggacgtaacagctgagacacgctcgaaggcagcgtcaatgctgttgcaaagggcgttgaaggttctcttggccgaatcgctgacttcagagctgtcaatgacgagttggaactgagcattcttctcggtcgaaacaccctcgaatgtgaggtcggcagcgggcgcaggagaatcaacaaagagagcaaaggcaggatcggactcatcaatctcaacatcagggttgacaacaccaatgtcagactggctgaatgagtcgctagcagaacgctcgacaacaggagcttcattcttagagctctcggggaggctgaaggaagaagaggattttccggacagagcttcgacatcgagggccgggccctcgggaacctccatgacagcaaatacgggagtgttaccgtagttcatgtcgattcctgagttccagccggcgttgttcatgcccatgctggagtggtccataccctggtttgaaaccatgaccatgttgggctgggggttctgctgcatctggaactcttggccacggttggcgttcgagtccttaggcatagcctgcatgttgggtgcagcctgctgaacttgttgctgttgctggggttgttgagattgctgttgaggttgagcgggcagggtgtcacccatgtcgttcaggaagttggagaagtggggagatcccaggagcatgcgggccaagtcgttcaggcgggcattttcttcgtaaagagcgcggttctggaggcgaatttcgtgcgcctcgttggttctagcggccacctcactttcgagctgaccaatgtattctggagatgtgttagcaaaaagaacatcacatacgtattcgagtgttcagatagtcatacccttgcggcgagatcggaaagcgcgagcggaaaccttgttccgcaactggcggcgctccttgctgctgagctttttgccctcttcgctagcgagaagacgctcgtcttcatccatatcggcctcgtccttccgggccttggccatctgcggcataccattggaagggctgggggagccctcgccattggccatggcattctgtcgcatctgttgaagtagacgagagatacgctcctcgacgacggggtcggggttacggggaccgcggacctgagacatagcatggcccacttgatccggacgctgctgtatctgaggacggaccatctcaatttgcttttgttgctgtgccttggccatcgcagcctgctgctgatgcatgccagggtacatgcgaccgacttgtgtggacggaccagcctgagccagctcatggcctccgagagcgttgggatcgacatattggctcttggtgccagggtttgcggggtagaagtatggcgaaggattcatggtttcgggatcaatctccatctccgatgggttccggcccggtgcggtgttgaagtcaaattgtgcgtcctcgcgcttcatgtgatgaccagcatacacttcagcgttcacgggaaatacttgaccgttgttgaaacccatcgggacctggctgtaagacatggacaaagcacctggtgggagaccagtctgttgtctgtgttcgtcgtattggtggcttggggcctggtatgctagaggagactggccacttgaggcaaagctggcactgcgggcgtcactggcgctgaactctgtacttgcgaccgatggttggctgaccataaccttggagcgagagggatcagatgtgtaggtgagttgatcaaagttgatgaatgagtcgagatcctggtcgtagttggccactggttgcataggatggtctgcgagagtcgccatggtgatctagataagtgtcctcgtgtgtgtagggggggggtaggcgtaaataaggcgtgagatatggggtgagatatggggtataggggggtataactgagataggttgaacgaaagataaaaaagagggagaatataaagataaagaggatccgaaaaacgaaggtctaaagaaatatggatttggatctagatggatagtgaacctgggagtgaaatggggaaaagggacaaaagtgttccggaatagcaacaggggcttgcgcgtcctttcttagtaagcgggggcctcaggaatgcagccccgtgattggcccaattgccacttgacggggtttgtttaccgtaccgtatcccgggaatgttttcactattttcagatctatatgtaacatacagatgtatacttcagctactatctactaatgagcaatcaattgcttgaaagactgtattttgcgccctatttgatagcctactagacattcaatagtcacagtaaccccctgttaattcttttgccggtcaaaccttccaggtgggccaatctcagggcaggaaccatccgatcccattggccgtcgggcgaaacttgccaagctcggagttactacagcgtatggtattgtaactgtacctttttgtccctgtcatgacgcaggtggctatgccatgggctgtttatcgaagattgtccgctttagtaaactatacattcctgttgacttcatgttgttttggatcagctagagatgcgcgagcatacagtatttttaggtcctgaaacttcgatcttcaaagacaaaaacctactaggcttgttcagactaacggtgactatcacagctagcggcgttcggggctgagccgattatttcgagtggcaccgggtgcgccaagcggtgggctcactctggaaaatatgtacagaaagaatactttgtacactttgtacactttgtacaacacacaatatccagagtacatgacccctgacccataataatactgatgttgtacggagatgtatccatatgcgcagattatgatccagggtgcgccttccatattcccatgtattgacaagaatcccttgtttcaaacccaggatgtacgtacgctggcgtctcgccggaacatacacggccaattgagccgagccctaagtgccggctagaccggtgtgagccagtcaaagacgtaaagtgggagtccggccctctcctgccccgtttgagaatcacaataagctttctagagtcggagcgggtcggccaaaaggtcctaaaggagatcgaacggccatcaagctcggtgatccgtgcacgtgaggagaggagctgttcctaatcgggctagcttgtccgactctattaaacactaaatctctgcctgtcgatccccgaaggatgcccgaggccctgctcataaattattatccacgaattccgaggttgactccgtagaatattcttccatttccaaggtttctatcaagttgcctctttggattgcccctgaaccttaaccaggcgaaacaacacaccgtggaatagctcgttattgcccctttttgttttatcctacccaagaatcaactttcccctgggcctcgactcttcggcagcccgctctggtggtgaacagaggtcatctcgatctatggcactccgtactacacacgacataggtagggctgtttcagattaccattgatccagccgcttagagtgaccgcgtgcaaagaggctgagctagttatgcgcctccgtgcctgaacagccactagcagtagcttgttccttattaaaaatagatattgaaaattttctgcactccgtacggcatttcactagggtcgatcatgccgatacataaacggtgatcactgatttttgagtcaaactagtaagtatttacaatttttgaagtctctgcaggaacgcctctttgtgcggatccttcatcaaactgttttgagtctcgggcagtggatctaggccattggctcgatctacctccacatccggcaattactcccttgccaacatgatatttgcctgaccgttcatatgattgattctcgtggcatggttcgggtacacacgtatgctacctccgctaatgcaatcacggtctagactatttctcttccttctacccattgtctggttgtctgacgccttctacaccctgatctcccggcccttcaaccctcaagaccctacactgtgtaccctgccaacggctccattttctggttgtctgacgactcattccagacccgctcagatttgaaatgagtctgagtttgttcgagactgttgaacgatttggtggagatgcagaaattaaggtctagatctagtacagcttattgtggacaatgagtagaatttggttgtgttgcaactccgatgctcgactggagatcttgatcgatcagtctagactttgtttgtttgggtattgagaacttgacctagtcttacccggtcttctgtgatatggagcagaaatatgaagcggaattgagcacatttacgtgtcgttgtggacttatacttttcgtgttactggcatttgggcgagataccgtagggttagccctcgacgatttagttcccggcgtctattagacgtactgcatcctctctataatttatatctagaaaattaagggctatgtcttgttagatatttacagattgaagagaaagaaaaatctctccatcgactttcattcaactcttttagatttcttatgttgtactgttgttccccaatatatatttctagtttctagtttggttaccataacaacgcacagaatctaaggactatcacctccagtgagacctgtagacataggtacatatacgtacgacctcctataatttagtgaataactcatagcaagatacgagcacaacgatgcaaagagcgacgccaaggaatataaattgccttaggcaccgattcattcctctttcggtccccgaccccataatggctgtcaagtagcatcagatttgttcgtattcgattcgatgactcgataaatgagaagttcaatgtgatcatagtggcgcattttgattctgcaaaggggcttgagcgtggatgccattgctactccatacatgtagttatcttatatgaacccccgcccgaacttcggcaactacttcagatatccaacacttggacctcgcgaaaaccactcaaataccaagaactccaacctgctgaagctatgacatcggccccgacaattctggctacgtgcaagcagacacggtttcatctgctagatgataatccttcgcaggaggtatgggtagccacaacaatgatctagatgcccattaacgttcaaatatgttctgttgacagatcgatgtggagggacttaacatcatagtcgcatcatctgcagctgaatccacggaagatgcctcaaagccaaagaccaaaggaaaatcaagggccaaggctgcggggagagagctcatatcagacgcgcacctacgactcaaggcaggcgttcactatgggttactaggtcgcaacggaactgggaagtcaagtgagacagagccccgcaagtactgtctacaaatctcagtatactgatgataccagcgctgctccgggcaatggctgagaaactcattcctggcatcccgcatgcgactcgcatggctattttgcagcaaacagaccagcaggatgacgttacattcggcgaagaccctaatcaggacaaaactgttttggaagccgttctcagcagcgatgaaagtaggaacgaggctgttcggatgacagaatgtcagtatgcctattcaattgggggttgtacttgactaacttgacaagttctatcgaaaagttttgagactgaagatccaatgcagcccgtgcgggcgatccgtaaaatccggcaccagaaagcagaaaagcatctcttcctggctcacaagaacgcaagcctgaaaagcggtgctcgaggtctacaagcaagaaaagacctgaaggctgccgaggggaagctcgaggctgcatcggagatgtaagttgcattaattcgcgctagagactatatctaacttctgccaggttggcccaggatgtagccgctatcgatgcggagacagtccagtcggatacccaagctgccgttgagacactacaaaatttacagtctcaaatcgaagacgtaagtcttcgtaggatgaccattcacctgctccgctaacatgaaacaagatgaaacttgccgatatgaagcaacaagcccgtcgcgttcttcttggtctcggctttaaagaagacggattcgagaagaaagtctctacgctctcaggtggctggcgtatgcgatgtatgctagccagcgttctggtccaagaccccgacatcatgatcctagatgagccgaccaacttcctcgatctgctaggagtagtgtggctagagaattacctgaaacaactccgcgacacatcagaaacaaccatcgtcttggtttcacacgacagagatttcatcaatgctgtctgcgaggagattgtcattctgcgagatcagaaattgacttatttccgagggaacctgtctgcatacgagcaagatttcgaggaacagaagctctacctagggcgcatgaaggaggcccaagaacggcaggttgcgcatatggaagctagtatccgggagaatatgaaaattggaaagaagaccaatgacgaaaataagctgcgacaagctaagtcacggcagaaaaaggtcgatgaccggatgggtcttcaagtcagcgcaaacgggggacgtttcaagctgaaccgtgatctagtcggatggcatctccacaatcgggctgagatcgacgttccgacagatgaaaagggcgcgactatgagcttgcccgatgcgacggagttgcggttccctgggccgctggtatcgcttgagggtattgtcttccagtacaagaaaaccgaccgcgtcatcctggatgacgtgaacttggttgttcacctgggtgatcgtgtcggaattatgggtctcaatggatcggggaaaacaacgctgctccgtattttgacgggacaggtgtctccttccaagggcaaggtgtcgactcactcccggttgaaagtgggctactatagccaacactccgtggaagagctgcaagaacgtggccgaggcgagcctagcttaactgcgctgggcttgttgacaattgagactgaaggatcgctgaacgagggcgctatcagaggtctactttcttcaatggggttagcaggtcgtattgcatctgatgtccctgtggccaagctgtcaggtggacaactggtatgtgaaacaatgtggaacattaaagcaagctactaataatatcgtcaatttaggtccgccttgcattagctcgaatcgtctggagtgcaccacaacttctgattcttgatgaaatcaccacgcatttggatttccacactgtcactgcattagctacggctctctcctccttcaatggcgccgtgctactaatttcacacgatcgtttccttgttcggtcggtaattgagggcaagcgagacaccgagcataagctcgatgaagatttcgaagggctggaggaggaagagaccgaagaaacgccaaggcgccggtcggtctatgtgattaaacaaggcaagatgaacgaacagaagaatggggtggagcagttcgaaaagagcctggtgaagagggtacagaagttgttagcgactatagattagttagttaactaactaaatggctgatgtcgtgcctccatgaccaattattcttccgcgggtgaagatatgatatcatgactcagcacggagcccgccgagaggcatgtgcgataagagacattcccctcattcctccgcggagtatctcattgcatatatatttgcaacatgcaccattttaccccttgaaagaacttcctcatggctggcttgtgcaagcggatcttgtcttgccctagggttgcccgtcagtggggcatacagactcgacttcagagcactcgcgccgcatcaagatctaacgccaccgtcgtccctgaattgcctcctccgcatcccgcaaccgaggcctccaaaccgtcaaaattcaagtccacgaagcccttctccgaattcctcaccgataccttcaatcggcaacatgactatctccgcattagcgtcacggaacggtgcaatctccggtgtctgtattgcatgcccgaggaaggcatagacctctcgccctctgcgaaactgcttacatccccggagatcctatacctatcctcgctattcgtctcacaaggcgtgaccaaaatccgattgactggcggagaaccgacggtccgcaaggacatcgtgccattgatgcaggacattggcaagctgcgacaaaatgggcttcgggaattgtgtctaacaaccaacggaatctcattacatcgaaaattggactcgatggtggaggctggtttgacgggagtcaatctcagccttgacacgctggatccattccagttccagatcatgacgagacgcaagggattcgatgctgtgatgaagagcatcgaccgcattctggaaatgaataaggtcggtgcggggatcaaattgaagatcaattgtgttgttatgaggggaatgaacgaccgagagatccttccgttcgtggagctgggccgcgagaagccgattgaagtgcgcttcatcgagtatatgcctttcggtggaaacaaatggaaccaggaaaagatgttctcatatcaggagatgctggctgttatccgagagaagtatcccacgttcgaaaaagtggccgaccacaagaatgacacgagtaagacataccgtgttcctggcttcgagggccgcgtgggatttatcacgagcatgacacacaacttctgtggtacctgcaacaggctacgtattactagcgacggaaatctcaaagtctgtctgttcggtaactctgaagtctccttgcgggatatcattcgtaaggagaatggtgggagcccgattgacgtggatgcaatgaacaacctgcagctgttggaaacagtacaaaacgcagcgcgccttagcgacgaaggcggcttggtgaatgaacgagaacgtgagattctcgacatcatcggcatggcagtgaaacgaaagaaggcgaaacacgccggcatggcacaacttaaggatatgaagaaccgtcctatgatcttgattggtgggtagccttttgttttttttttcttgatgattggaaacgctttacgacttgtagatcatccatatgaacatttcttttggatctcatggcattggcgatattttgataccatgtatacatgcaattgatgtgtttagacattgtttgaatcattaagctgatagatgaactagataataaaccgccatggaggtcagggtctccctcttggtcttctataccagtacatatactttcgcatctccctacagcttcccaaagtcgtctctaccaccccgggcgctctaagccagagaccacagactgtacttctcgtccatctccctctctacccaccacctcagacaccgacctccctcaccttacaccatccaagaccgtacacatgacacagatcaccgaaaagcccgaaacaaagcgcgtcgccacagccgcctgcaccgtctccttctcaaacgcccgaccctgggaaatcctccgcgaaggccaaaccacgcacaaaggcgacgtcttcagcgtcgcccggatcgcgggtatcatggccgccaaaagaacgcctgatattgttcccctttgccatcccggcattggtattaccggagtcgaggtcagcgtggaactcgttgggcctgcgggggacagggacagggatcacggcgccatgcatgtcgtggcgtcggtcagctgcttcggtcgcacaggcgtagaaatggaggctatgacggctactatgggtgcggctttgacggtttatgatatgctcaaggctgtggataaggggatggtcattgattctgtccgattgttggagaaacagggtgggaagagtgggcattgggtacgggaatgactcgtgtagttaatttgagtagttgtaggtacttgattgctatgtagtactccgtatagactctttctttaattaaagtggatgttctatctcttctccatactgcaatagccctaataccccttgagcctatctatacccgcggatcagccctatgggccgtttaaattctcctgggcttcaccgtattttcatttctattttttctttcacagccaatgatctttatatgattggcgatatacaactgtagcaatcgttcctcctttctgcattcctctatgtggccatggctcatggcccaagacattttcgagcccacatcactcaaatcggcttagccttgcagtcgaggttttgcaattttccttttttcccttcaaacatatgagaattcttaaaattcctctgtttgaggctattcgtctcaatttgagacctatggggttgtgtgggtgtaattgaaaaccctgcaaaaaaaaataaacctccttcgtttcatcattacatcgacaacgcctcagcggcaacgaggtcagcacaaaaacacagactgtgctttatcaagccctgccgaattttgtcgccgaattagaatgcatgtcttggtgacccgtacgttcgcctgggctactggcgtaaaattcaactaaccgctttatacagttcgcaagtggcggaggaaaaccgggagcgccataatggcagtgctcccgcccttgaatttcttgacgctacactattcatatttcattgcgacatgcataatcgccagtatcattttctatctgacatcgtcgccatggcgtagcgttgcctatgtggattcgattttcatgtgcgtcagtgctatgacgggtgctggattgaatacggtatggactgaatctcatggctatatctcgccgaggctaataacctgaccaggtggatctgtcgactctgaacagcttccaacaagcagttttgttcactatgcttatcctgggccatgctattctcatctccctcactgtacttctagtacgtaagagggcgttcgaggcgaagttcaagggtgtctccgatgagcgggaaagagagcgatctagccgtaacctctcggaagttgaactacaggccagggaccgagatcccgcccatgcaagcaccgggattgatctcctcgacgagagtatcgaaggacacggctgtaaaccacgcccaaagacaaccgtgctggtccaaacgaccccgggagagccatcatcccgtattgagcagagatgggtggacgacgaccagataaccgtcggcggcacaccccgtcatcatcaccaccgagtcttccccatggctggcatcggggcgagaccggatctgcataaccacccgcgcgacgcagcgcccaatgtgcccttggtcgtgaaggactcggtgtctggtctcaagggaatcctccgcggtacacagaagtacatagcctccaagggacttgtgtcccgcaactcccagttccacgatctcactcctgccgagcgtgaggaactaggcggtgtcgagtacaaggccgtctcgttgctgtctgtggttgtgttcctttactttatcttgtttattatattcggcatggtcggtgtcggtggctggctggaagccaatgatcccgccgtgacgcgcacgaacggcctctcgcctttctggacgggtgctttctttgctgtttctgctttcgtgaacagtggcatgtcgctcctggacgcgaatatgactgctttgcagttgaggtaggtgctctagaccgcccgtgtttcaatattcaaacttgctgatcttctctagggcttacccacttctcacaatgggatttctgatcctcgctggaaacacccttttcccatgtttcctccggttcattatctggactatgagggtcatgcttccggatcggccgatgtggcagtcgtggcgcataaccctggattttatcctggagcatcctcgaagggttagtcgttgcattactctaatagcttgcaggatatagacttatcatcaagcaggtctatacgaatctcttccctgctcgccatacgtggtatctactcggcacgattatcatcctgaacggtatcgactgggcagcatttgagctattgtccattggaaacaaggacattgagactcttcctaccgagtaccgtgtgttggatggactgttccaagccctaggtttgtcaatcaatatcagcaacagcgccatatctgaaccagctaacaacttatctcgaaagcggttcgcgctggtggattctacgtcgtaaccattgccgatcttcgccaaggtctcttggttctatatggtaagtgcttcggtatccttagtctgtaatatcatgctaacaaaacctctagtactcatgatggtaagacctactagtatcacacccatacaccaatcccaaactaacatctcacccagtacgtctccgcgtacccagtaacactcacaatgcggtaagcaccccccgaacccaacccaacccacactagagaaaccacaatctaacacccacccagcaacacaaacgtctacgaagaacgctcgctaggaatctacgcacacgacgaatccccagactcaccggcaaacacaagccgcagcaacgtagtaatggacctaatccgacagcacctcggccgcccaggcccatcggaaacatcgcgcggctacttcctgcaccagcagctgcgctcccagctcagccatgacctgtggtggatcgcgctggcggtgttcttcatcgcgatcgccgagtcagaccactacaacaaccagcctgtggccttctccaccttcaatatcatcttcgaggttgtctctgcgtacggctgtgtcggtgtgagtcttgggttccccgggaagaattactcgttctgtggcgcctggcatacgattagcaagttgattcttgctgctgtggctttgcgtgggcggcatcggggtttgcccgtggctattgacaaggctattatgttgcctagtgagtctttggcttgggcggaggaggaggatgctgctatgcggagggatagatctagggcttgggctcaggagaatgggcctgttgggtctgtttagatggtgatttttgatatacccccttttgtttggccattttattttttagactgtttccacggtgtgtggatttatgagacccatgatgatatgacattttgaagataaataattcttttgtaggactgagtagctacccatggtgtatcctggtaaacaaagtagacatatgcaataaccgtgtgaagtagatggacatcatcggggacatggacaaggagatatacaaattaaccaaaaattagacgatctactcgtcctccatctccagctcgtcttcatcttcatcttcactctcgatctcgacttcctcctcgctttccaattcctcttcaccctcatcctcgctgccatcgtcactgccagcaacaccgcccatatcctcatcctctgcatcattcttcttcgcctcctgtctccgcttctcttcctcgatacgaccttcttcgaggacagcagcacgctcgtcacgcagcctacgctgcgtcttaacaaacgcaccgacaggagtagtctcccagtcaacatccttgaggaaagactcgacgctagagcggttgcggggagcataggagacgttcagacggcgctcctcgatccagcgggcattggcctcaaccttctgcacgagcagcaagatcatctggttgaccttggcgttcttgtttccaccactgcgggcagagacctgcttcagccagcgcttgagggagacaatgacgggcacggacagttccgggaacgcaatgtgcttggaccacaggacgaagaactcggaaaggagttccgtgacctgctcaccgatgccgtcctggtaaatgcgcgagcgcaggtaggatttaggcgcgcggatcgctgtgttgaagtccaggggcttgagcgtgctggacttggcgggcttgcgcatctccgctgaggtcaggacctcgagaagggaagctgagagcgggatataggtgcctgtggcacgggagatgcggagcagggagcgcgtcaattggaagcgcagggggaagtacgtggcggtggggatgaggcgcatggcgcccagggtgatttgcacgacggggtagataaggggacgcagagcggactgcttgccgatttgggcctcgacaaggccatcacagtgctgtgaaagcacacgggaccagaagtccagcgagtgcacgtattgccagttgtagatggtcttgtaggactccttggaggtgtgggtgatgctcttgcgcaagtgcatagcaagctgacggatgaaggagaatcctgctgtgtatgagacgttctggtcaatgccccagatttcggctgcggagttcttcatcaagttcacgcctgccagagtgtgcaccgttgtgttgcggctgcccttgacaacaccctcgtaggtggccttgagcacactctccctgatacctgcatctcccagaaccataaggcggcggagaatcaagaaacctgtgatacgggtggcgtcggccgtggacacatcagaccaaattccgacgacaatcttgactagtgtcttcagcaccttgcggaactgaagaaggtaaggcagcatgggctcaattgacgccagggtcaacttgagtgtcgatgcatccgacaagttaatcagaagctgatgaactgaagcagtgtgcgatttgatcagcggtgtgagggtcttgaatttcttggaatccaatgagaccctgatcttgccagaagcgctctctttgacggggagatgatgggccaggaccttggggatggtgttgagggccgtgataagaacctggtggtacacgttcttgtcggagatggtgtatttttgctccggggcatcggggtcattgacataggcggccgcacggaatgcgagcacagcctggcgcatagctcggatcgagttttgctcctccatcaacttctgccacttcttgaccatctcaatagtcaaggtctcatcctcgggctcctcttcttccttcttcgacttcttcttcttcttcttggccggctcctcgtcttccggttcttcgctttcgctcagagcgtcaacctctgaaagatcgccttggtcaccgaaatcgagcagttcagaatcgttttccttaagatatttatagaactcggggtccttgtccttcaatgactccagctggtctttgtgctcgtcataagcatcgacactgtctgcgtcgtcattgtcactctcgccctcggacgcctcagcatctgcctgtgccttgtcttctgagcgcttgcgcttgccaatcttgggggtggtatccttcttgctcgccttctttcccttctcttcgggaatatcgaagccaccagcgaagaaatcgtcgacgttcatttcggaaaaggcattttccttcttcaattcctccgggttcttctctgcagcggcttcggcttcggcgcggcgagcagcacttttttccttgcgcttgtcgttcagttggtgtctctgcttgatcttggcatgcgctttgcgtcgctcaaggacatccggcagacggttctgcacgaacttcttggtcgattttttgccgccaaccattttgagagagtaatgcagaaagagtctgcaagtgtagcttggtcggaaaatggctggtcaaaaaaaaaattggggagaaaatcggcgggtccacctttcagaccgcctttggcatcgagcgataacatccaggcaatctacaagacaaccttggaagacaaccttcgattacgattgacgattgacgacttacggttattgtacatagcgagaatttatcaacaatgtactcacagcgcccactttcttatgcaccgaccccctacagctacacacccaatcccgcccggtcggccacaatcaacctcgatgaagtatgggtccttgtctccgcattgatagttacattgactaatgccactttcttaggaagtaaaactagcatccagtgcagtcgagcgcgacttatacgaatcactagccgaaatatacagcatcattgtcaccctggatggactcgagaaagcatacatcaaggatgtggtcaccgaggcagaatataccgagacgtgcacacggctactgaagcaatacaagtccagtattggagatgagacagtatcgcgggagtttgtggatctggaaaccttcaaacggacctggggggtgagtgttgctctccattttaccccgcaaactccgatgcatctctgacatatgtggacaatatagctagaatgcccacgagccacagagcgattgcgcattggtcttccagccacagttgagcaagcgtctcacggtggaccgacccccagtatgggtgcaacggcgacaggacaggctggcggtgcctcgggtagtcttattctggcagcaaccgaaaacttcatcaccttcctcgatgcattgaagcttaatatggtatcgaaggatgcactgcatccactcttatcggaggtgattcagtctgtgaacaaggtaacagataccgatttcgaagaccgcggcaagatcattcagtggttgatcgcattgaaccaaatgcgagctacggaggaattgagcgaggaccaagcgcgtgaacttgcatttgatattgagcaggcttatcagggcttcaaggctacgttgaactgattgggggatcattgacttggtgctccggcaaggcgttccaatggacggtagaaataccatttcgttttgatgtattgacatgttcatcggtttttgctagctaaatatacccactctggcttgtttttgattgagtatccttgtataagtacagcgatttcaggcatctactactgtgtctcgaagagcatctagcttgaagacatacggtgttcggactaacctactctatttcccgtccgatatcaactgtttctcactcacagcagtcttcatgtcattcctgttcttctgttgatacattgatgcctgatagttcaggcgacattcaacccgcggaacggcagcgccggcctttcctctttgggaatattttcttttttctccgccacaatttcgtcgagttctcctggctgtgaggtcaatttgttgattttcattcctctccggcaacacctagagaacatacagttgtcaccatgatcagtgccacagatgagcctctacatggttagttcacaattagcccctctggttcatctggtccacaaaagataatggaactgataagcgcagtgcttgacctcccgcaagtctacgagaagccctctggaactgatctcgtgaaggctttggctctgttgagcttgcagccacgcacatttggcacgaccgctgatgtcgtcaaaggccctgtagtccagcctgcaggagtgacccggtatctcacatccatcatcgccagtccattagcatggctcgacaacgatgaactccgaggggcaatctgggatgcggccgctgcacgactaagtgaacggtctggtcgaaccggtaaccaggcgatctatccagctgtgttatgttatcccgctgaccgtgactcattcgttcccagctatgccggcaatgtctcgaatattcaccgtgcccacctcctccggcgaagaatacacactgaccctccacgaaccgtcactaactgcggataacctcggtatgaagacctgggtatcttcgtatcttctctcacgccggcttcacaatcttggatcgccgccagcacttgtcacctcgtcggctactccctccacattgaaaccccagaaacctctgcgggcactcgaactcggtgccggaacgggcttggtcgggctttcctttgctgccctgcaaggcgagtctgcaaccgttcacctcaccgacttacccgagattgtccccaacctcgctcacaacgctgccttgaacgtagaactcctcaacagaaccggggcgactgtaaccaccggcttgcttgactggtctgtcacaccgtcgccccttccaattgcggaagagcagtttgatgtgattctcgcggcggatccactgtactcgcccaaacatcctaaatggttggtggacaccattaagccctggctcagccgtgcgcttgatgcgcgagtcgtggtggagatgccgctacgagatgcatatctgccgcaggtgaatgagttccggcagcggatgggcgagttgggcctggctgtggttgaggagggcgaggaggtcggttacgatgactgggagagtgcggatggaggcgcactggctgtcaactgctggtggtcgatttggggatggagtgaaaaggtatagtggcggtactaccaggtcatattgggaatggtgaccaaacgaaatgacgataatagacgatacacgatatattagaaatagggattcctatatacatagacattggttattgagcaatgcaaaccttggaaacgaatttctcgtttcactttttagtagaatcaacttgatgaaccaggaacattgttggtcgttggtaaaagaggagctgatcatcacgtggcgatgacgtcgggggcacatctcatgtccagtggacttctaccttgatctatgtttctaagattcattaataccaacaagaagaatggcttatttttatatccattcacagagaacagctattctctatacccgtatggtcagtcaatagcctagcgtcattcaaatcaagcaagtcatgctaatgcgacaacagagcatagtccaggctccagaccaaactgctacaacagccgcgaattcctgaaatctgatatatcaagctgctattgatagccagccagatctaacgacgaaaattgcaatcgcatataccaccaaacatctgcgcaatgattggacttctagcccttacctccatcccaacggtgacaggtgtctccctcgcttctagcgagcagcgcaaagcaaaccagcgcaaagaagatgcacgtcgcatggtgaagttcaacatcgtagcagaatgcgatggcgacacagatgatgaccgcgaattaaacggcatgactgttgttgtaagagacgagaaggtaagtaaatccaatgcaaacaggattaaaagtctacaggaacctcacaatccctccgaataatattttaatcagagctcaaattaaagaccacatagactaacacttttaccctccacaggtctacctcgccgacccagattcctccaaacgatccccgccagctttcacagccctggccttctatatcgagtacccagaaccggaagaattgaaatatctcaagcgcgagcgtggcctcggcctgccgacttacgttcaggacaacccgccccttcttaactggatctacgcagataaggaaacgcatgagttgcggtacgggaatcggtcgcagagcgtggagcagctggtcgagccgtgggactggtgtaagaatgagaagtacattttgctcgaaaagaagcagaatgctttcattgcggttgaagaggaggagggtcaatgggcgcttcattatgatcgggatggcgatgagcttgcgcgcgttcttgaggagcagggactgttggattgtgcttttgtgcctgtcaaattggtgaggaaggttgttgaggagaagccgccgccgccgccgccacctcctgctgctgctgctcaggctgcagctccccaggttcaggggaatggtcagagccagaagtagatggattgggagctggacaaccgttatgattgagccggacttttttgtgtatatacttgatgagatgacttaatgcatttatgattcgatcatgattatgggaataccacggtagtaaccttggaatattttagtgtacagagaaaaattggacatttaatcatccagtccagcccagctaccagtgtcgctgacgttgccactaaccgctgcggcagccttcctgttgcgactggccgcaatagcaccccttttgttattctccatgcgacgttcaaagccactcttggtactaattctcataccacgggcaccctttccatcatcctccttatcggtcaatcttggggcctggcgcgccttgacaccatgcctcttcatatccttcttgctgttcttgcttaggttcggcagagcgtcgagcagccatttctggatggacttctcgccctcttcgccgccgcgtagcttctcgctgacgtcgatgatgttggcaatgctcttcacgtagggaatgtcttccttagtgtagtaggtgacagcgataccgccctcgcgaccagcgcggccggttcgccccacgcggtgaacgtagacggcggctgagttggggatatcgtagttgaccacgccattgataccgcggaagtcgacgccacgggctagcagatccgttgtaaccaaaatccagatctcgcctttgcggaaatcgcgcatgatatcggaacgttggccatctgagagatctgaatgaagaaccgcaatacgtgaggatccacctgcttccgcggggatatcgtatttgagttcggagtgcagagccaccgcacgaggaatggtctgtgtgaaaatgaggaagggagggcggaggcggatatctgaggctgaggctgcagccgggcgaagaagttgacgaagtcccatcagtttaccttgctctgttgctgcgtacacaagtttgtggtcaatgttggggattgcagaatctttcaatcctacaaccagacgaagtagtggatgtggctcgcttggcttttgtcccatatcttccagtcgctctctgatggtcgacttggtgagatcctcgatattggatcccatggtagctgaccaaaggccgacacgcaggtcgggatgtgagcacgctttccagatatcgagtgtctgttcccggaacaatgggtccaggagaacatcggcttcgtccatgaccagactccgcactagaggtaatgttgccacggtggtcgtccgattcgcagataaagcattaaccaacattagaggtgtagtgacgagaatatcactcttggtgaccgggatgttggctcgctcctttgctggcttgctttcggcaccttcatcttcggacccggatgattcttcgctgttctcgtcaagaacattgccatcaccattatctccaacacgcataccctttctcataagcgtgatcttcacgccagttccagccactagcttgcggccctcgttgacaatctggcttgcaagctccctggtgggcgccacaactacagacaaaataccatgctcgtccgggtttgagtggtggtgtcgaacaattttgttgatcacagggatcaagaatgacaacgtcttgccgctgccggtgggagcaacgaccagaagatctggctcggaagactctccaagaagtaatggaaggcttccaagctggacctctgtaggtacggtaaaaccttgctctgcaacattctctgcaagccgcgaggagatcttgtatttggaccgaagttccttgaagttaagtagaggctccgggaacaagcgtctggcacgcttctgctccttcttactgagagtcggcgcctcttctttctttgacttcttcttctttttcttggactctttggtagacgtaggctggacttggatctcttccaagtcgcgcatgtccgtaaccttgatcttgtgtgagttcaagatagtgcgacgctccacttcatccatggaatcgtcgtcatcggatgcggcatcctgagcagacaatttctcagcgtcctcggtcgcagcagcggtttccgtcacactagctgcagggcgcttgtttgaactgaaaaagtcgagttcagggacatcttcctcgtcctgttggacggcagcgcctctctttctttttttgccattcttggcagactcgagcttgtcggtctccgccgtccggaagagctgcgggttagctgctttcccggtggacggcagacgagagtccgaggccgaggaggtaggctttaattttgttgacctggtcaacaatctgaacgcatccatatcttttgtggttgagtcgaaaatgtcgatgatattctgaaaagaaaaaaaagtggtccgccgactttcctcccggaccaatcagcgttgagcgttatatatggccgccgccgaggaaaaataacaagaggataaaccacagatgaagtgtctgaacataagacatatatgatatcaggactatattcatacctaggggatccgggtcatgattacagagaggtgtgggaagaataaggatagccgaagtcaataaacctttagattacagtagcttttagagcacaaatagcacaggaatgaattgcaatgacaaggtctatctcagacaacagtttaaattccatcgtctatcatacacagcgcgggacgattaacatatgaaagaaaggaaaggacgattctcatctatcgacatccatttagtgcgcgtgcgcaggctcgccacggtaaccaataatgttcatccgaccgatcatctcgccaacagtgaagaagccaatgacctcagcggcagtgacaccggcgagggcgagctgcttggggctggcgttgcggatagaggcgaggatagacgagggggaggggagggtcttgagggcggcagggttggtgatgaaaggctggaagtaggactggaaggtggccaggttgctaggaggaattgttaggtcgggagtaaagaatcgagtacggggtccgacttacggaggagccatgttctggccacggaacaccagtctgccgagctcaattccgaccttggagtagtagatggtaggagggatcatggctattgattgacggttagttgtgcacgttcgcgaacgtaacccgcggattgaggtcaacaaggaggttgggactgggcgccacgattccaaccggatcaatcggtcaatcgttgccttttttcttttaataagtacccaatgtccaacgctcctttgtagccatccggacgggagaagaggagtgtcccttacaatcgacgaaagagatgaccttgccggcgggtccaccgatcttgcgcagggcaccagcggcattcgcgagggcagggccagcggaggcagagaccttggacagacccgcagaggccttggaggcagctgaggaagcagcctcaccagccttagtggcagcctccgaggtggaagaggcgtgtctgacggcggttctccgggtcaggaactgcgattgccgcaggacggcacgggtgacggcgggcattttgaatgttgtggaggaaatgagtggaaaagaggagggaagcaaaggacacccgaagcagttgctaataggagggcagtatgatctaatgatctggagaatcgcgcaacggagaaccagatgaagatttgacgctcgggaacttcaggaattacgggtcacgtgagtcgccgtttatcccaagtaaacaatttacttttctggaatataaatttggaggagatgtaaggctttatggatttacttttggatattgaagcgctagaaggtgtcaacctgaaagtggatggtaacctgagcaccttgttatagcattgtacattcatacctacatccggccttgccagtcgaatcacaaccggcacttcactccggatggtagaaataagttgataatttttttccttctagacggattgatgaatatatgggcttctacggtgtgataaatgctccgtagatttaattttcaaaaaaatacgcacatcgaagccattgtaagccaaaatatataaacgcaatattttgtatggagtatagatacactaattgttccaccagtcagtaagattgagtccagatttccaaaatccgatgcaattaatgcatcaaggacaacagataaatggtatattgagcaaaaaaagcgagattagagtggaatttactataagaaaaagcgactagcgacctataagccagagagaatggtccaaccaacatagaagctacccagggaagtatcagtataaagagcaaatatactaggggcttatgcataatgctacagcacttaaaccataaatctgttagatatctacatgcatagctgcctcctgtattcttcatcgtcaccttacaattgtgacaccactagacaaccgtagtagtcggtccaacgaaaaatagcacaggatgagcctagggttgaatttgtctcacacaatactacctccatgtaggtagtgaaataggaagagttgttacgcagctcctcactgcctatgatatatccgagaaattgattgctagatcctggtaggcgcgtaacacgaagcatgcagagattcgagtatggtgagacaaattgtatctacctatgcatgttgtacatgtagacatcgtatatagtagagactttcatggatgtaaagaatagacattgcctgtggctgtaaaaaggtttgcactgtttgtctcggaaaaatgaattcatctccgccggagaattgcctctcttgttgatgcaatgggttctcaccttgaccgcattatttacttgacccagagacaccccagattgatttctgaaccgaaccaagataacatgagaaaatagccctggaggaaatcagaaccgggagccttcagcacaatattaaccgatcgccgattaacattcggcccgagatcgagagcgggcaaggattgcctcattcagacggaaaaagcagttggacccccgcgcggttaaatcgaaagcccctccactccacttttcgctactccatatgtatcaccgtggggtgaacaatatgagatcaccggacattgatgcggttcgagtattaaagtggctgtttcctcgcatttaggcatttgttctccattttcttcctctcccctctccctctccctctccctctccacactatacaatgacttccgcaacaactgtcactaagaccaacatcggtgtctacaccaacccaaaccatgacctctggatcgccgaatccaacccaacagtagaggacatcaattctggcaagggcctgaaggctggcgaggtcacaattgaggtgcgcagcactggtatttgtggatccgatgtgcacttctggcacgccggttgtatcggcccaatgatcgtcaagggcgaccatgtcctcggccacgaatcagccggccagataattgctgtcgcccctgatgtcacccacctcaaggtcggtgaccgcgttgccgttgagcccaacattatctgtaacgcctgcgagccctgtctgaccggccgctataacggttgcgtgaatgttgctttcctctccacaccgcccatcgatggcctgctccggcggtacgtcaaccaccttgccatctggtgtcataagatcggcgatatgagatatgaggacggtgctatgttggagccccttagtgtgtccttggcggctatcgagcgcagcggtctgcgtctcggtgacccgctgctcatcactggtgccggtcccatcggcctgatcagtttgctcagtgcacgcgctgctggtgcctgtcctattgtcatcactgacattgacgagggccgtttggcgtttgctaaatctctagctcctgaagtgcgcacttataaggtggaaattggcaagtccgcggaagagtgcgcggacggtatcatcaatgccttgaatgatggtcagggttctggccctgatgccctgcgccccacgctggccctggagtgcactggtgtcgagatcagtgtcagctccgccatctggagtgtcaagttcggtggcaaggtgtttgtcatcggtgtcggcaagaacgagatgaccattcccttcatgcgtctcagcactcaggagatcgacttgcagtaccagtaccgctactgcaacacctggcctcgagccatccggctggttcagaacggcgtgatcgatttgcacaaattgattactcaccgctactctcttgagaacgctctcgaggcctttgagaccgctgctaatcccaagactggcgccatcaaggtgcagattatgagctctgaggaagatgtcaaggccgccactgctggcgagaagttttgaacgaagagagtaaaaagatgagcggtatctgagagcattagtgggtttctggttggggtcaagagcggccgttggcgttggcgattttctttctatattcacgaatgatgtctagaggatgccattgggtagaatagaaagcacatgaaatggctatttgacataatctttggtcgatgcgatgaagaaggtagaaactgtagaggcacaattgtcaatgtaacagatggggaccttgcaagtcaaccaagtcaaaccctcccccgacgtcattcccggcaataagccgggctaatactggggaaataacagcaacaatcaaaaatggggtaaaaaatggaccctgcagcgtgaatccggagctactggagctagggtaccttgtataggcccgaaacccggggatggcgcacagccaagagggaccgtccgataattgcccgtctccccgcgcaaacgtttgacgatgcaactgagcaatatgtcaattccagctaatcatgtggaaaacaaacagttttctcgcgtatccccttgattcatgttgcatcactccccaccacccctcacttcagatcccggccactgcatcctttaaaaggtgcactgtccctcctacatcttgagtgtatcctgctgtgctcatcttgtgcttcttcagtgctcgcccgattttaaacatgaaaggcgcactgcttttcctggctcccctcgtgggagccgccgtcctgggatcgacatctcagcttgaccattgtcctggctacaaggcttccaatgtgaagcagttgggccagacattgactgctgaccttagtcttgctggagatgcctgcaatacctatggcactgatcttccaaacctgaagctcctcgtggaggctcaaactggtatgcttcttcatcattcccaagtgaatgtatactcataattctataagaaacccgtctccatgtcatcatctacgatgccgatgaggaggtctaccaagttccagaatctgttctccccagaccctcgagcgcaaaaggtcaccaaaaggagcccgctcttcgcttcgacttcgaagagaaacctttctcattccgcgttctgcgcggggacgaagttctcttcgacactactgatacaaagatcatcttccagtcccagtacttgaacttgcgcacttggctccccactgatcctaacctgtatggtctgggtgaacacagcgattcgctgcgtctacctaccacaaactatactcgcacgatctggaaccgtgacgcatatggcatcccctccaacacgaacctttacggtactcatcctgtctacgttgatcaccgcggagagaatggtactcatggggtgttcttcttgaattcggatggaatggatatcaagattgacaggactgctgatggcaaacaatacctcgagtacaacaccatcggcggagtccttgacttctacttcatggccggtcctactcccaaggaagtgagcgagcagtactcggaggtcgttggccttcctgctatgcaaagctactggacgtttggagtatgtcatttctaacttgaatgttttgagaagtaatattctgatcagtattcctttagtttcacaactgtcggtatggttaccaggatgtatttgatgtcgccgaggcagtttacaactacagccgtgccggaatcccactcgagaccatgtggaccgacatcgactacatgagtggtcgaaaggtatttactctagacgatgagcggttccctctagagaagatgcgcgagttggtttcgtaccttcacaagaacgaccagcactatattgtcatggtcgatccggccgtcagtgcctctggtaagggataattacttgttcccctctcacttctgctctaaccctgtgtgttaccagataatggtgcttacaaacgaggtcacgacgagggtgtcttcctgtaccgtgacgacgagcgtagcgaactctacaaaggtgagtttaccatcagaagcacaattcccaccttcctaacgtaatctaggcgtcgtctggcctggcccaaccgtctacccagactggttcaacgaagacacccagaaatactggaactcggaattcaagcgattcttcaaccccaaagacggtgtcgacatcgacggtctctggatcgacatgaacgaagcttccaatttctgcccatacccctgcacgagcccagaacagtttaccaaggatgacgacttaccccctgcgcctccggcagtccgatcgcctccccgccagatccccggtttcccggctgatttccagcctgggtcttcctcctctggggcttctctgtcgcagcgtgtgaagagaggtgatgttgctgtcgagaaacgtagcatcaacgagaaacggagccagggtggaaagggacaaaagactggcttgtctggtcgcgacctcattaacccgctctatcagatcgcaaacgaggctggctcgattagcaacaagaccattgatactgatctcattcatgctggcgagggttacgccgagtacgacacacacaatctttatggaactagtgagtcccctgtgtttactatcaataacctttctaacaataacctagtgatgagctcggcttcccgcgaggcaatgttgaagcgtcgaccccaggtgcgacctttgatcatcacgcgtagcacctttgccggagcaggctcccacgtcggccattggtaatatcaacaaatcccaaatcagtaccatagaatatgctaacccaatcccaggctcggcgacaacttgagccaatgggataaactgcgcgtgtccatcccgcagatgctagccttcgcctcgatttaccaagtcccaatggtcggcagcgacgtctgcggcttcggcggagacacgacggaagagctttgcgcgcgctgggccatgctcggcgccttctctccgttctaccggaaccacaactcgctcggcaacctggcccaggaattctaccgctggcccgttgtcaccgaggccgcgaagaagatcatcgatatcagataccgtctgctcgattacctctacacttcgttccaccagcagaccttgacgggtagcccgttcctccagccgctcttctacgtctacccggaggacagcaagacctttggcaacgagctgcagttcttcttcggtgattccattctcgtctcgcctgtcttggatgaaggcgccaactcggtcgatgcctatttccccaaggatctgttctacgattggtttaccggtcttgcggtgcagggcgatggatccgtcaagacgattaccgatctcgcggttaccgatatcccgatccacatccgtggcgggagcatcatccccctccgtacggagagtgccaagaccacgacggaactgcgcaagcgcggctttgagattctcattgcgcctggtgcggatggatccgcggcgggtgagctgtaccttgatgatggcgagtcgatcgaaccggctagtgctgcagagattcagttccagtacaagaatggcaagctcaagatcctgggccggttcgggtatcaccctaatgtggttattgaggctgttactctgctcggacagaagaataagcgtcgcgacgttgaatacgatgctcagagacagagcattacaaagaaggtcgacatcaagttgactggacctgctgaggtgactttgtgagtttcctacagtgcatcggtgatattaggaggaggttgaattatggatagtctttgaggtagtcgggctctttttttagaaagtgggatccatggtcgcctggaggttatttttccggggccaccacattcttccaaggtttcggtaccttgtagtactccaatgccacgttttactcaagtttgatcttaatttaggggtctcagccatggatcaataatgtgtgttgtaagcgagtattttactcggcaagatgagtcgacacggtgattggatagattgagtaatgttcctgcatgctagccccatagccaaggcgagttcatagccaagcagacgagtgagttagcaattgtgtaaatatgactaataattcagggtctgaaaggcaaccccaaaccaataaccccttgcatgaccttgcatgagaggaggtggaggttaggagggagaaagacactgcctggatacaatgaaattactctttcaactctttcaactctggaacccttgaacatttgagagacaagaataaatccatcgctattctaccaatgaggcaatagggctaaatcctgccaggtactagcgggctattaagggatacgcgccgagggaaactagttcaggcacaggccgctagttcctgagtcatctgatagaaaacggcgaacccgtggtcttgatagttattattagtatcggattggggcaattttacgcgagcagtgctgagtcgaacatactagtatattgttatatattgtaaaaggcaaccaaagcggaaactgaaaggaaatgtcttggacaaaggtctcatactgttgtgcggtggtcttagtggttgggtggcccgtgtttcacgattgcatatggatgcgataagtaatgataggcgttaatttgttagatggggggtttagggtgatccataagaaggctatccaatactaaagcctatgattgttaggaggtaatagatgtaatagatgtacggagtaataaatgataaatgccgtggttgggattgtaatataaaatccaagctggggatgaataaaaaaaagaagcccctcctgataaggccgtaataggctttgtcagtggagctatttttgaaaaggtctcataatacggagtacatagtatgatgtatattatcctattgaattttcttttatggacccttgatgcaaccgtagttgtgctcataactacgcgagctcaatctgtaacatctgatcgccgtgatcggctggaactatacaggacgctttgggtaaatgtacggattattcatgtatggatgtatggatgtatcgtatcaatacaatgccacccgtggttgtttccagcctcatccgtgtctcacgacccgcaaacccaaggacatgagtcttgggtgctccacttccccctcatggaagatcccaaaggggtccactagactcgtccgaccttttctatttgtctcagtggttcgctggccttgtccgttcatccaatcatgtcctgccagtcactcccgcctccctttttttagtagcgtgtggcagtgtaatatatttctactgatatacggaatattccgtactttgatatggagatagatatataaggcggtccctgtcgttccttcccaaggttcttactataatcccactttcgtttccgctttccacgctcgagatatttatatttaatagggtcgcttcctggacttcctttcttttcgtgttcactcacactcacttcttgacgcgtatcatatcatacaatgccgtcgttcatgaagttcgcgactgcggctttcgccgtggctacacctttcgtttctgctcagacttactctgactgcaatccgatggagacaacatgccctgccaacaagggtctggcttcgtccagcgctcacttcgacttcacccaggctagctccctcgaccagtggaagatcagtggcggacaagttcccactaccgccaacggtgcccagttcactatcaacaaggaaggagatgctcctaccatcgtcagcgatttctacttcttctacggcgaattgtccattgagatgaagacttctcctggccaaggcattgtcagctccgcgtttttgcaatccgatgacaaggatgagattgactgggtacgtgacatcgaaatcggatcattacttccaacatacagaataattgctaaccgaaatacaggaagcattgggcggaaagactgacaccgttgagaccaactacttcggcaagggcgacacctcgacttatgatcgtgagacctgggtccccgtcagcactcctcaggactctttccacacctacaccatccaatggtccaaggagagtatcacctggttgatcgatggcgcgagtctccgcactgtcaagtacgcagatgcccagggtggcgctcgcttccctcagacccctatgaacatccaccttggtatctgggccggtggtgctcctaccaacggacagggtaccattgactgggctggtggtttgaccgactactccaaggggccctacaccatgtacatcaagagcatcactgttaacaacgccaaccccgccgagtcttacacttggtccgacaagtctggctcctccgacagcatcaagttcaccgggtccaacgccgtgagctctcgcagccctactactactgatgctgccaccgtctcctcttccgaggctgcttccactactgagtctccttccacctccgagactccttctaccaccgaggctccttctactactaccgagagcacttccagcgctcccactactctggctaccaggacctcaatctcctctgccgagtccactgccgcttctagctcttcatctgccgagtcgactgctgagtcgactgctgcttctagctccggtgctgaatccactgccgcttccagctccggtgctgccggtgcttcccccagtggctccagcagctctggctctggctccggctctagctctagctctagccccagctccagctctggttctggctcgtcctccagtgccagcgctagcgctagccccaccttcaacgcagctgcctctgtcgctgctacctacttgggacccgtgtccctcctgggtctggtgaccgccctgctccagctgtaaatgtcccttttgagcgctatgattttttgacgcatcattaatgacacgctcctcgaaagaggatacttggctggaccgggtatggtaatagttgatgggatgcgattgtaattttttctggctgtaccattttttttcccttttcgttgtccttggcgcccaaatgcctgcaacctatcctatttgttaggtggcccggatgtgttaattggcatcttccggtaactggcgattttctttgggcggacatcatgtatctatcagcgtcatacatactttgccatcgagcaaacatgcaataatatcaagtcaattgactttctcaagcactttaatcttttccattgtatacaatcgaatctagatctttcaccgcttgtttctggttgctgtatatcccttgactgttcatcccatcgtgctcggctaggttatgtacgttccaacaccaacaccagcatcacattcgcatcaatcatatgcataccggtcctcgcttccctcggcttagagtcccactatggtctaactgcggacgaacacctacagaatcccggaccctgggaaaatttgcaccccatgaaccgtggatcaggctgttgattgaacttgaattgtaatgggcctgattgtggattggctggtgatgaattgtgcctaggcgaaatgtctgtagtcggattggttggttgagtattgatgtatagccgaaccgtggttggcgcaatatcggatacattcgtttccaggggtttgggtttggtttaccggatttactatgttgtatgtatgtatgtacgatgtattgtatgtgtttgggtgtgaattgtatgttttacttcgtatatcgtagtaggtacaacatccttcgtaaaaaaaaaaacaatcgtaaatggtaaaatactgtcgtggctcgttattgcgtctaactcatctcatctcatgttctcggatagaaacgcccaaagtgcaaagaaaaaaaaaagtagtccaaatagcttgaagaaaacccttcaactgaaaactcgatcaactttcggaccctgacaaaaatccgggattctcctcagggtccccaacccccgtggagacctcaattcaccaagtggacccagccccagtcgcacgtcgcacatcctttaactggcgtgataaccgcaacaccgagtcagcaacaggacggtggtgcgtggccgcgaccctgagcaaggcaagagttgcggcgggccggggtgtagatgtgggttcggtggatgcggtagaggacacggcagacgatgacgactccgtcagtgcatctgcattggcatctgcatctcctgacgatcgcccccggaacaaatatgccccgaagggtcccagcgggagcgaatcgagtacggagtatagcctatcgctgctgctgtcctcagatgcagatcggtgattgtgcaatgttgaactccgccgttcttcgcgtgttacgatcccgtccaccgcttcgaggtggtcgtctattgttatgaatcgcgtgctgagggagtctgctttgctgcggatctgcgcgcgcagtcggtctagatactcttcgcgtcgtcgcagctgtatcgcgagtcgtgtgtctagagctgcggtgccgcttatttcggttgctggtcgggaggcgagcaggctgtcgattgcggagcgtaggtcggcgcggagagagtcgaattcccagactgctgtttggacggcttggttgctgccggtgaattcgagatccagcgcgttgcgggcgtctgggaaggttgttttcagttgcgattctaggtcagcgagcatgctttcgctttgtttgaggattgcggatagaggtgtgagggtttcgagggccgtgtcgaatatggattctagctggcgctgggcggttgcgagagtctcctctcggggtgttgtggatggagggtaggcgctgcgtggttggtatgcagggagggtgatgcagctgttggggtagagagtcttgatgcttgggatacggcagaggtctttggcttggtagactacctcggggagaactagcagatgcaagataaaggcgatcaacactgcgttgactgctttgcggacgagggcactatggccacgaaagatggatttgcatttcacgactaggcttgcttgtttggtgggggtcgtctctgcagacaaaccagcatctgcatctccagctttagtggtctggtcttgctctttctgctttacatcattcggcgtggacactttgcgtcgttttttcatgctttctgggccttgctgcatcggagtccgtacatattctacccaagacccgtctatgttaggtgcttcgcagatagagggcatgatgagctccgggcctgatatagtccatgatgatgaggatgtgggtgactctgctgacggattggccgtctttctggtcgctttgtcgctttcatgccggcgatttcgagttttggtggggtctttttccttcagagaaacagttgatgctatcacccaggattcgccaagagctgagcgatctggggtacgaggctgttctgtagacatggcgtaaacatttcagcaaggaaaatgcactttgtgtaatggttaatagttctgtagttaatatctcatgactcggagtgtttcaacgtatgtttgattgcgactggctcaatcagaccgcacgcgtaaagcggtggggaagaaagatcggagaaacgcggccgaggaattgagaaccttcagcaaccatgcgctcattacttcgcttgagaccgtccttgcctggcgttcgatctctgccatggcaatttgcacgatcgcgaccgctgtcatacacagcgattcgcgattgctcgtgttctgataaaccggaagctcccacgatacctcccaccgaccatcgagctattggaaccgcccaggagctcttcacatcttcagtctacagtcctggatctcctttattcctcccgaatggcacacatgttgtcaacaaactcatctccttcctccgcacacagtacctacaatatggcttccgtgaagtcctgactccgatcatctacaaaaagtcgctctgggagatatcgggccactggcagaactacaaggatgatatgtatgaggtgaccggccgaggagctagtggtgaggcagagggcgaagtgggtgaagacgaatcctacggactgaagccaatgaactgtcccggccactgcctactcttcaagtcgcagaatcactcctaccgcgacatgccagtgcgctatgcagacttcagcccgctgcaccgcaacgaagtgtccgggtcgctatctggcttgacgcgcctgaggcgtttccatcaggatgatggacatctgttctgtagaccgcagcagatcaaatcggagattgcatcggcgctgggatttgtggatatggctatgaagacatttggactcggtccgtatcgattggtgctgtcaaccagacccgaaacggattatattgggactttggaaatgtgggataatgctgagacgcaattgcgcgaagctctggatagcaccggacgcgaatgggcgctgaatgaaggcgatggtgcgttttacggccccaagatcgacatccagctccaggatcaagctggaaagtaccaccagctatcaactatccaattggacatgaacctgccacaacgatttgagctggaatatcaagttgcagagggggagccggactacaatccagccacgcccggagttgcaagaccagttatggttcaccgcgccattttcggctccttggagcggtttttggcgttgctgattgaacagcacggtggtcactggccattctggctttctccgcgccaggccattatcctgacggttaaccaagacgatgctgttgtgcgccgagctcaagaagcggccgccaagttcgctggtttccgcgcattgctgaatgatggtagcgccgagtcaccccgtccactgtcctctgtcgactctacgttcttggtggacatcgataccagcgcacagaccctgggcaagaagattcagcgcgccaaacagatgaagtacaacctcatcttcattctcggaccacgggacctggccgatggtggcatctccgttgatgttactgggcagatgaagagcaagacggataaaaatgctcagacattgcaggcgctgatcaaagccagactaggcgatgatgcgctgcagaatcctcgagctatcaagcttagtgtggacgaagttcatccgctattggtggaactcgagaagaactttgtgtaactttgtatgttgtataactatatgtgttgtcattttgagcgtgcctgactggatctttgccctatcattgtatattagaccgatcttttccgaatccaagtcatcattccacctgatgcacacaataattccaaacaatgcctgcggctatccgcggggtggatgcctcaggagacaccactccgatgttcgggcccctatggagacgggcacagtatgtagatattcgttgcatatgactgtcaaatgaagtaaagggaacataaatgatattaattgacattggcaatctgccagcggtatttcaatttcatcatcaagtcacttgcagatcttcacgccctgtggtcgacaatatacacatcacgtgactccgctgtcggcgccgaaaaactcggcgtcattgacgggcccatttgagtcacagcatattccccattcttaattggccttcttttctcttttgctataaaagattccccgtgtccatattttggaagccattttctgcttttaatcacatcaatatcgagtctgcttggctcagctataacgacaccctaccttttatcgtctcttatccacttgtgcccccgcggtgccccgccaacactatgccgatgtatgttgcgatgactccaattcggtgttcctacatactaatctcttgaaggctcaaggatccctcaaaaaagtacaagcccttcaagccggtgaatctgccaaatcgccaatggcccaataaaattattgacaagcctcctcgctggctggcaactgatctgcgtgatggcaaccagtctctgccggacccaatggtatgatatgatgtactgcgctcaatgctgtttcccatattgattggattggatctataggatggcgagcaaaaataccgtttcttcaagatgctcgtggatattggttacaaggaaatcgaagtgtccttcccttccgcatcccaaacggacttcgactttacccgccgtctggtagaagagcccggtctcacacccgatgatgtcgccctgcaggtcctggccccctgccgtgaggatctcatccgtcgcacagtcgactccctgaagggcgccaagaaggctatcctccacatctacctcgcaacgagcccctgtttccgtcgcataatcttcaacatggaccacaagcagagtctggagatggctgtcaaatgcacaaagtatgcccgctctatcaccaaggacgacccctcccaggccggcacagattggcaattcgagttctcccccgagactttctccgataccgagcccgagtacgccgtggaggtctgccaggctgtgaaggctgcctggggacccacggaggagaagcccatcatatttaacctgcccgccacggtagagatggccacccccaacgtctttgctgatcaggtcgagtacttctgcacaaacatgactgagcgcgagaagtttgttgtctcagtccacccgcataacgaccgtggctgcgctgttgccgccgctgaactggcacagatggctggtgccgatcgtgtagagggtactctgttcggcaacggtgagcgtaccggaaacgtggacctggttactctcgccctgaacctgtacacacaaggtgtctcgccaaacgtcgacttctcggacatcaactctgtcatcaaggtggtagaggagagcaacaagatcccagtcaacgagcgtgcaccatatggtggtcagctcgtggtgtgcgcattctctggaaggttcgttgtcctttctttttcctacgttattcgctttgctaacctatttcgaatccagtcaccaagatgcaatcaagaagggcttcaaactgcgccaagatggcgagggcgccgacgaggaaaccgagtgggaagtcccgtacctccccctggatccccaagatatcggccgtacctacgaggcagtcatccgtgtcaactcccaaagtggcaagggtggcgccgcctggattatcctgcgaagcctggagctggatctccctcgcgctctgcaggtcgagttcagcaagatcgtgcaggagaagaccgaggctgtcagccgggagctgaaacctaccgagatcgtcaacctcttcgaggaggcctaccacctcaagtcaaacccccgcttcacccttgtcgactacagcatcaccaccgaccgctcgcagtcccctgctcctcctgagcccggcaaggccctcaacaccaagaacctcaagcgtcgcttcaccggtattatcgagatcgacaatgttcagcatgccatcaccggtgtcggcccaggtgctatttcctccctggctaccgctctttctaccctcggtattgatctcgatgtccgcgactacaaggaacactccattggtcgcggtcgcgacaccaaggctgctacctacattcagtgcacagcagccggcagcaatcaacaggtgtggggtgttggtatccaccaggatgtggtccaggcctctctgattgcgctgcttagcgccgccagctcggtaagatctgttcctgatttgtctgcatctcaccactaacatgcgtttagttcctcacctcccgggctggttctcctgctcctttccgtcccatccgctccaacaccctcaccaacgaggacatcgaagctctcgagcagttgaccagcactccagaggctgttacatctaacggcggtctgagcgccaaggccaacatcgaacagctgacaaaaaaggctgaaaatttgtaaaaaaaagtttaagaaaagcaaccgactaaaagtgatagcgataatgtgaataccatgaacaatttgaatcaatattttcttcaaggattgctcttcagatgtaacattgacttagctgaatatagtagagttgaaattcgtggtcattggctagttatgcatatccaccgacattttcactcatgtcaagctataaaagaccagagacattcgagctcaccacccaaacaactcatccaaactccatcctctctttgcactggccccataagcattgaacgtctgcggcccctcagccgaaataatatacccattctcacaagacgagaacgagaccttcggctgattcgcgtagaaggtatcgaagcccgagtccagcgcatcagcaagactgttcactttaccggctgggtgtagctggcgccaggggtatcgacatgcgtcaccttcgcaggacttgagcactagcatgagtgcgtccaatcgcgctattatttgtggcagctcgcgatttgcaatcttgtagttggggtgtttggctgggtatgtgcctaggttcacggtttgatggggatcgctcttttttagagtgttaaggcttgttgaatatcctgtgggatagaaggggatggatggcttaccttcagatcgaagaactctttctcgtttgtgcaccatactgcatagtatagactatagtcgtcggcaaccagtcggatacccttgtatgtgtttctttggtagctgttatgtggctggtcgagtttgtcgctggcatacccgtagatcccttctggtactgcctatcttgatgttagctggttggttaatatgtgcttgctgtgtgaattactcactaatccccagtattcaatagcaacatgctccgtcctattgtctgccgtgctggcagcaatggtagtagggatagtcttaccgtccaatccgtctcgagtaacgccagctatgttcaagaaagtaggagctagatccgtatgagaagtgatagcatccagagtctgattctttccgataccagggcctcggacgatgagagggacgttgatatcagtttctatacgagttagcatatctatacaccatagacaatcaagacaatcaagaccaactcaccataaccacagttcttaccaggctgcatccgatgctggcccagatgatacccattatccgtcgaaaagaagatataagtattatccagctccccaaccttttccaacctctcaacaagcctcccaaccatctcatcaacagcctgcaaagcccgcagccgacaccgctggaactcatcaatataatcaacattcgtctgattcaactcaggcacattctgcacccagctaacggcattctcaatcagtgtattaaagctctcatcgcgcggcgcctgcacatcctcaaacaaacccgcatgccgcggcgcaaactccggctcaccgaaccagttcgcgttcctcgtggaatcatgagacccattcgagtgtggcgcgttgggcgctactgtcagcatccacggctgtttgtgcttaaccgcctcgtcgatgaaaccctctgctttttcggcgatcacgtctgtcgagtactgcccgtcgtacttgactggtgctgcgccgttgcgcgtcatccgtgcgtaccagtatcggtatgtgtacggatctaggaggaagtccgagccgttgaaccctcgtacgtacggattgttgtagttttcctctgtgtgtgcattccacatcttgcctacgtagtaggtgttgtagcctgcttcttgcatccatagtgggaggtagttgtcgttccagcctgctgagactacttttggatagccgccgtaggggagtccaacgtcggttacgttcgtgttgtgtggcatgcgaccggtccagaggttggctcgggatggacagcatagtgcgattgagcagaaatgtttggagtagcttgttccttgttgaacgagagtttccttgttaaagtgttagtctggggagggagaaagtagggcttgtatggaaggaatagacccacctgcaacttgggcatgtgctctaaaccgcccacatatttaccctgatcatctgttagaatgaagagaatattaggttgcttggcgacagctagagttgtcaagagcagcaatctcagtacgttcatcgctgcgaatttggcgttattgttgagcttgagagctgggaggatctatataaccccggcttagctctttggcttctgcaagccctgcgtcatggaagagacgtaaagagaccgaggagctgttgtgtgatttctccatataattgcatattgtcgatcatccgagtagaaatcgtaatgctgtacaacgtactccgtacatgatcggcatgtcagtgataggttggaagtaacagggaagtcgatcagtcggagtataaaaagatcggcgattgcgagcttgtgcacatcaatggtgttagggtgggtcgtatcctttagtctagtacatatgataacgatcaaccaaatcagaaatctgatctacaagcgtcagaaagatatactgggtatgtacaaattacaaacatagagctaaggtattgaggataagccggataaagaacaagcaatgctagggggaaaagaagatcagaactgtcaagcaaacacgccggccggcttttaaaaaggtatcatttccaatctgtacaatgtacgggctcaatccaagttcaagcctcgtagttgccgatttggcggtgcagaattgtcgctgtctgtgcggccaacgtcatgcccgtcttctgcgcctagtgccgactggtacatgagagcttcttggggccaatcattgaccccactgtcctgtgtgcttggacgtgccgtctcagcagggggtgtgctagcagcctgggggctgttggggttccatccctgttggctaggaagcggctctcgtcccgtcgagggccgttcatcgccagggtgtccatacgattgagactggtcagggttgtcggccatatcaaaactgaaccggaaatcacggtccacggcggacgtacccgcggtgggatccaacgtgttgtagtgttgatcatcaaactcggctacgaccgtggcagactgtggctccttgatgtgaggcacagcagagctaggcccggggataggagtggcaagaggactattgtcagtaacactccccagttcatacggcacagacccggcttggccggtctgataagtagccgcgggatgactggtctcttccaatgtcaccccacgtagagagcgagggacatttgcgtcgatatccggattcattgtggactgtcggatgctggtgcccatggtgcttccagccttggaaactctgctcatccggtgctgaggtatgtccgcaaatgggctatcgccctccaggtcgcgaatactgaactgagcaatggttcgcagcttccgggttacccatgaggcgagaaccttgccgcgctgcttctcgcctagacgagagcgggggaagtcgccgtgggagacgaatgcgacaatatccgcaacgacttggtgctccatgaggataacatcaacaatgacggggaccagggccgctagataggcttttcgggtaacttcaacgacaacaacgaccaagccaccggcttggaaaatagcactgagaatgttagcctccaggtcagatctcaatagattatcatctacttaccatcctccattcacgatattgcggtggcaactctctacggagttttcaatgtccatagggaagtgattgagtccattgacttcaaaagtttcgccgatactgccgaggaggaagaggacttgcatatcaactggctggccgccaggaccgatcggccgagtaacggtgtgaaggaaaccaagatcaccagtacggacataaggcacgctggggtcaccgtctgcaactctgccgttcaaccgctcggagtcaaattcttgctttgatttgtagaacccctcagcgcaagcgtcggactggacccagatctcaccgtactctccaacgtgcgagagagtgcaggtctccgggttcatgatcgcaatctgtgtgttaactgggaccatgcccgaatcctgcagcaaaagcgcggtaggatcggcatcggggtctacggggtaaataagaccttgacggaggcttcgcaagtcgagccatagttcgatcggctcaatgcacatgtatgatcgtgtggtaaccatcgggttgagaacgtgcgagtaaatgacgttgatcgaggtacggtccaagctggcattggcgaaatgtaggcgtacctttccatctgtataatcggattagcttctcttcatggctctgatggtgacgacacatacagagatccgttctaggccgcccctctgcggaaatcatcaggttcttcagttcttgaagctggaagccttttccagccatagcactcattgcgtaatccaacatctgactggtggcgtaagtgtccttgatcttgtaccgagcaagggttacgaagagagtcaatgggttttgagcgaaatcgactggtgaaactagatatgtaggcgcacctgaataatatgttagggtggagatgttcatagattagcagcaaacttaccgacgtaaatgcccatcaagcaggtgtggaggaatccgagacccagggtacttcgaacacttccaagcaccggccttgagcttgtcatttggcaggtttctttttgaaccttgcacatgcccattatggtttcatgggaaatttgcaccgagattcttcgctgatctggggtccaataagtccagaccatagcaggctggttaccctggagccaagtatccttcacagtgtagccgagctcgcgacatccgtgggactgcttcgagggctttgtggtattgtatatagcaggaacaccaatgcgaagaacctgggcggactgcttgatatgctgcgacacaagcttctgcctcatgacatggtcaacatcgttattgacaatgatggccttgatgttgaagtcgccgatgacgtgcaagaatgcaggagcatcctccgaaagacggttttgatcaataggagccatcgggatgacaacggcacccaagcacagacaagcatggacggcatagacgtactcttccgagtgggtgtacatcagcacgagatgatctcctggtcgcaccttcaccttgttcttgaggtaggtcgccaccgcagaaactttgaggtcaaacttcttccaggtgacgccttttccttcctttccacggctatcgatagagcagtaagccaattcttcagcttggcgagcgactcgccattgaagaaggtcgacgattgtgttaaagttgttcaatggggtggaagttcggtcatccatcactacatcgcgataatccacacccgaatattgcttttcctggtaggcaagcaagtcttgtcgtgatgctagagcagtgggggaccagattccaccctcaggatcaacaccgacgggcaggttcatcactgatcgttcaactccaaacttaacatgcactgcttgcagcataccgcactcgaaatctttgcgacagagcatgttgccaatttcttgtctgccattcttggtaacgcgcggcagactgttcggggctgtaagtagaacacagtatacccgtagatgatgctcttggtatagtacctccatacacctgtcggcgagcgaatcaagaagaaccgagtcgagctgccttggcggaccgccggaagttgttggcgccgttgaggccgagtaagactccaaaataatcacaggaagatgttcttcgttaacaaacacatcgaacgcagtacaatcatgaattttcggcaccttcttaagaatgctaactgttagatgttgaacgaagaagtatcgatgttccacaatctcttggccgtgctcaacccattcgactttttggcggagacgatcctcgtagagaccaagcacgaaaagtcggccctcaatcacacatccaagtagaccagtgcgcaggaattcaggttccacgagtatcggggtcgggttaggctcctcgaatttgtaggggcgagcgtggaatatggcctctgtgtgtttcggcaatgcccagaagccaccagaaagagagggtgaatcaacccaaatctctccaataacatttggcgtacaaaggagattggtctccggatcaacgacagcgagagttgcgtcaggaattgggtagccgaaagcgccaacgcgtacagcatgcggcatactgctggcatactttcgtgcatcctcgcccatggctagcacaaccacttcattgctctttaatgcctctttgtctagaagcacctcgctaagctcgtttttagggctctgcttgatcgtagaaactcgtgatccaccacccagaagactgcttccgaagcccgttttagtctcagacttggtaaggctctcgtcctctttcttataatcatcgcggccggctgggtccatttcatgggtcaaggaacatcccattcgctcttcaccaccgagccagtcacgcatactaatgaccatacctccatgctctggtaagcagagcatcggagccacaatttctctagcccgtgggttcctcattggccgaagccatctgtctgccaggatttcatggaactcagggtcgagagtaagtgtatcgatgagacagagtttgacgctgctgaaattaggttccgagtttttcttaaaatgtcttgtggccatcggatcttgctggtagttgtaggtggcgatcttcaagccagagtaatcggtcgccatgactgatgccttgtatttggtgatgagatgggcatataaaccgggtgtttccacagcccggtcctcgtgccaaacggttgtatggccaccgtaaacggtgaagagaatggccatgatcataccaattccttgtctcggatcgaggtaactgatgatcgtctctcccttagtgctatattgcctagcgcttgactccacaggaactgtagaaatgatcgcactcagacatgccatttgatgcatgatagtccggtggctcatcacaacaccacgcatatcacccgtcggggccctcgcaaactcaatataggccagatcggggacctgcagcgcaggtgtatcgtccttcttctttggatggaaactgccgaactcattcgtcttccaccactcgactcctcgtggccaactgagtttttgagctgtgatatcgcgttggaagttcttcaggttattctcagttgtcaatgccagatgtgcctgcgttgaggtgagcacaatatttagacttgtgtaatcatccagactgttgataggcacggcgacaactcctgcaataaagcagcccaagagcgcgacagcgaactcgataatttcagcttcgcggtagatgagagcgacacgatctccgcgatatagattactcttatcgcgaataacctgagcaactttctcggcgcgactagacagtttttcccacgttatcgatgcaacctccttgccctttgcatccagcacccaatatgctgcttgcttggggtgagcccgagcacgatgccgtaacaccgcgggcaggttgtcaaagttcgacatggggacatttttgtcgtgcggatcgttcaatgagaaaggaatctctcgaggttcgaggggaagtagatgctcaatagccggtccgtgctgaagttccgccccagcaggcatcaatggcggggccatgtttgctgttggcgaaaaggcttccccggactgagaatagcggtggaagccacctccatagctatccctataatcatcatgctgttgccccgcaaagtcggaaaagtagccctgctgggaatcaagcatcgtggactgtcgcgtgggcgctccagatgctggatcgtaatatgccatgccctcgtccgcgtactcaggttcggcgggggtatactcctgaggatattcctgagcgtactcctgagggtactcctgagggtactcctgagcgtactcgggctgagacatatattcgggctgagaatttggattgaacgcgtagttctgactcattaaagttgcggttctggaaccatcctggccttgtaaccctggggctgggggtttaggaaggaagagggagtcgtaagagctccctgaaggcgcgcggtcatgagcttggagcatgctttctctacgatgagaccctagcgatgcatgcgactgatcctgtgtatttataccggcaccttgatcatatccgacggctccgctgccctgtgagccatgactgcctgcgtaaatgggggaagtgacgtgtggcagggaagaatcggcagttggtgggcgaacgctcagaatggccggcgggacccttccagggctggttggggatgcatcgtagccaagaccggcctgtgaattgatatcaaggggcttgttgggaccgaaatattgcgaaagcaggatcgtacgtcgcttctggtatcttgtcgttgtcagtcctatgcatctgctggtccagaaatctctgtcgcaagaaccaaatctatgacaaggcacaattggcttgtaatactggttgtagccagggatagcttaccctttttgagtgatatcgccctcctgtcatggatcatacataagaaaaagcatacaacaagtgcacgagatgtacatacctccaattcccgatctaggtcccgcaaagcggcctgtatctcgggagactcttccgccatttagatggagggtcggaaagcctcaattcggggaaacgtatcaaaagcgcgggggagggatggggggcacggagtcaagaacacctcatcgcaatgagcgtctcgagggcgcagatgaggggtggcggatttgccaagtgcagccctgatagccgcaggttgtatttaccggggtgtgagtcgatcagcgagtcaatccgtcctgtctctgatcttcgcgcaagacacccgcgcaacgtcacccgccaaggcggtcagacgagccgagagcctgagacatgcgacggagagactatatatacccccagatatggttgtctcagatatatatagaaggtgacgagaaaattctacatctataccatcaagcctactgcatagagttccgatgaaagttgtggctgttcaggtactgtctgacttggtgtatcgcgtgtcccagtctaggctcggaactactgggaatgagacaccaagttacaccaatttggggctaggttcgtgtgttcagtggaggattttggcttaaattgaatagatgtaaatttgatatggaatcaaagcccaaaagtattcagtagaatcagtagacagtcagtgcgatcaatataaggctgggattatttgggtgtggatcgtcataaagtttccttcctcaggcactgaggcaccgaggcatgaatcaggtgatatccactatcagcctaccctaatcacatgacccccgcacaacctaagcgaggcacaccaatttctttcttggatacccggaacctcatcgacgttcaaccaccaaacgacaacccggtcaatttcccacgaacccctcccgcacagtcaacatgtccgacaacggggacgtcgaggtcgccgccttccctgtcctgcccaaggaggttctggccgagcagggcagcatcaagctgttcaacaagtggagctacgatgatgtcgagatccgggatatttccctgacgtgagtctttctatcaggtcctctatgcgccgagtgaattcctgttgtgtgcgagaaaagaacgagtcgaattggtggaatggcaagacttcgacaactggaagggggatatcgaaattctttatcggaggggacacaacacggcttggaactagttttcttttcgcacacagcaggaaatcaacagcgcgcacaaggaccggcaatcgcgcgactatcaggtttacagaggtgctgacccgccatgacagcgactacatccagatccgctcccccgtctacctctcccactctgccggtcgctatgccgccaagcgtttccgcaaggctcagtgccctatcatcgagcgtctcaccaactctctcatgatgaacggccgcaacaacggaaagaagcttctggccgttcgcatcgtcgcccacgctttcgagattgtatgtgccactccgaccaattcaaccattcaactatccaattcagacgctaattctcaattctacaggttcacatcatgaccgaccagaaccctctccaggttgccgttgacgccattgtcaactgcggtccccgtgaggactccacccgtatcggtagccagggtaccgtccgtcgccagggtatgtgaaaaagtcttgtctcgccatgtctggtatcaaatactaactcccttccagccgtcgatgtgtctcccctccgtcgcgtgaaccagtctatctctctgctcaccatcggtgctcgcgaggcctctttccgcaacatcaagagcattgctgagtgccttgctgaggagctgatcaacgccgccaagggttcttccaactcctacgctatcaagaagaaggatgagctcgagcgtgttgccaagagcaaccggtaaaggggttgtgttggatttgttctccgtttggtcctctgtctgcgtatactggagtggacggggttttaaccgggattcagtggattcgcatgcatctgcaaggctgtacataatgtgatacagtcaaggaggaagcacgatcttaaaagggaacgcattcggacggctttctttgtagttgtgatgcgatcatgaagaccttgggtcgtaaagacctatttcctaaaaagaaaaaatttcttttattctcgtttttgaatggatctagcaagtctagcatagagattgtagaagaatatacgatcaacatgatccaatgtcttaatgtttatgatttgatagttctagccaaatcagatattgccaaggttgagatttttcatcgcttatcgatacggcgaatacggagaaaaaaagtttcggacctccaacataccctccccaaccaccacattcttattttcaactccaaaaatggtgaaaagaaagctgggagccttggaaaaggtcgaggctgacctgtacgtaaatgtctgacccgatgcgccctgatcaattggtcagaggcttcagtccgtgatgctaacatcttttttttgcgattcgcaggcccaatttgcagcacaagattcgcagagatcctaagtaagttatatgcagagttccctatgctattttgtacacggtcggggattaattatcgctttgcttttcaggtcttatatcgaggattttcgcgcccaacattaccaatatgaatcccatcgtgagattttcatggcggcgcctacatctgctacggacaccggtctgatttctcttcgggatctcattgacttcatctctcatgtggccgactgttacccgggcatctgtaaggatttcccgcaacagctcattgatatgctcatgcagcaccacctggtattggagacagagttgcgggagaagctggttggaagtttagcgcttttgaagaagaaggatcttatagattcagcaaagtgcgaagaccctttcattacttccctactttcgatcctaaccactactctaggctacttcacactctcttccccatcctcatctctacacctagcaagaccctgcgggctctgctcttccaaaagatcctctctgagctacgaaccgcaaatgcaaagaccactaaccacaagttgaaccggactatgcaaacagttctattcaacttggtcacatcagaccgcacatcggctaaaggcctgtgggcgatcaagatcaccagagagctatggaagcgccaaatctggacggaggctaaggccgttgagatcatgaaggaggcagctttgtcacaaaatgagaaggtcatcatcggtggagtccgtttcttcctcggtggcgataaggagcgcgaggaattagaggacgaagacagtgaagaagaagtcagtgttggccaggttaagcatcaacttaccatcaataagaagacccgaaagaaggcccgtgtcgccgaaaaggccatcaaagcggtcaggaacaaggagcgcaagaagggaaatcccaatcctctcaacttctccgcgcttcatttgcttcacgatccccaaggattcgcggataacatgttcttcaagcatctccagaacagcaagtctaagttgaatctggagcaaaagcttcaggtgctacagctggtctctcgcctggtcggcttgcacaagttgcacatcatgccgctctactcttacttccaaaagtaccttacgccccgccaaccttctgtgacttcattcctggcatctctagcccaagcctcgcacgacttggtgcctcctgatgttctcgagcctctgattcagaagattgcaaatgagttcgtgtccgaagcatctgccggtgaagtcgccacggctggtctgaatgccatccgtgaaatttgtgctagacagcctttggctattgatgagaccctgttgcaggatctcgtcatgtacaagaagagtaaggataagggtgtcatgatggcctccaagggtctcctcagtctgtaccgtgatgttggtgcgcagatgctgaagaagcgtgaccgtggcaaggaggcctcgatgagtttacgtgctggtgagagaccagagagacgttacggtcagcaggaggccggcgaaattgagggtctggaactcttggctaagtggaaagatgaggagcgtcgcaagaagaacatcgagaatggccttccatctgatgcggaagataacgaagaggagaacgacgaggccgactgggcagcctggaacgtcgaagaggacgaggacagcgatgtcgacggagaatggatcaatgtggaggaagatgttgacattgtactgagtgattccgaggatgaaggcaagccggcatcaaagaaggccaaacaggacgaagagaccaagaaggacaccgaaaaagaagccgaaaaacccattgatttcatgaaactggccaccacccgcatcctcaccccagctgatctcgccaaacttacggagcttcgtgctcaggccgcagccgaagccactcttccgggcaacaagggccgcgtcgctgccccatggacctcccgccataccgatgacccattgaccgctggtgagattgagggtcttgctgctctatctgccgccagggccactcgtgaggaacgtattgcccacgccaaggagggcaagactgagcatatgagtaaggaggctcgtcgcaaggaacgcaaggtggagcaaggaaagagttctaccaacaaggaaaaggctcgcaagaagaacttcctcatgacgttgggcaaggcgcgcagcaagaacaagagaagtttggtggagacccgtgctgtgcttcgggctcacgtcgatcgtggcaagagaggcggacggagaggaaacgttggccagtgataggctttttatgtccgtttttcttaaaaataatgatttgttatatacagtacattacttttgtcattgcacgaggctcacaggatagaccataaagagcatatactaccttatgacagccataaccctatcaatgattatactccatcgtataaagtaaagattaattaaaggtgctcgattggttccacgacgcgatattagtgggggtactatgcgttgatcaacgcgtaccgcgttaagtggcgtccccgttgcctgagcagcctcgtccttttttctttttcttcccttttcccactacactacgtcactcactcgtgggcattttgagaatactcccatattgaaatcgaaaaccgcatatcccttttccaacatggcacccagcaatagcgacttgtcaaagcgacgacgcttccaacctcctatcacaacgttcttcacatccgcctcggaaccagtgtcttcagctacacctgcggtgtcacaccaccaccattacgccgcagcaacattctctgcccacccggttgtgcctgccaaagttcagtcatcgcttctgtctgtcggaatgcgggttcggaaatccgtcgcagacggttatagaaccaacatgtccaagacagaagaaaaggccccactctcgacagctgtcggtcaaaccccgcgtgctcaaccctaccacggcagcagatactctgagctgtcacctttttccggcactggtaaatcctccagccacgatgactccctcgttaccgacgatggcgacgcatactcgatcccatcaagcagccaagactcggctgtgtcatttgccttgggcggtcaaaagcgggctttggaattagatggtgacattctggtcgatgaggatgttgatgaatcatccaacaatttcggatcctggaacgagaactcatgcggacgaaccatcctgtctccgaatttgggccaaagtcgccgtatccttgctgtgcgacacagcaagattgaacagcccattatggacatggatgacttcgaggaggctacgttcctccgccgccgtgaggaagttgacgcagaggatgtgcggatgtacggcgcttgaactgttagtttgtgcttctcatttcacttcccctacgagcccttccatggcatggcctactatcttcttgtttatccttgttgggtctggaatcggcttggtttcttttaccagacttgtattatacccactgttgttctatgttgtaccatattgtcttgtacatttatctttttccatctgcagagcagcgaatgtgacttattacgaatattagttcatactgtcacgtttgtaatcaactctagggtccagggagcacctgggaactattaatatcaggcatcaccgtcagtatggacttgcactgagattaagactaaatttaataatatacaaaaataacgcaaccagacaatgagactgagaaacatcttgtataagaggaacggccaccaaatgtaggatgtatccctacatcccgagttgtaatcccattattccaagtcaccaatgtcgcaatcttgcccagtatacacgcatcttcaaaaatctcgatattcgaggtggaggatgattatctgataacatcgaaatggtactcttcctgcgagtacgatagttgtcatattcgagaacggtaatggtacccttcaaggtagcgccaaatttagcatcaatgtcgtcaaactgccctgactcaatatccggatattcttccatctcttgcttgggcgaatgctgatgtattcgatatcgaacgagaggatttatccaagtgtcactggaggccatggtttgtgtgtataggtgtgttagagatatgaaagtgtgagaagagagaagagaagtaccaatattatgaagatacatccatatatgtactagtagctactagacttttgtttgccgattttgctcacggagtacacaaaagtatattatctcgtggtccatgggttatgcatagggtttcacttccattccaaggtaattgtatgtattttgctacatttaagtagttattaactaagatgcagaattggagccagttatatattcctaatacggagagccaatattcaattattgcagaatagcacagttagcaaaacactcatgcttctaattccaagctcatggccctgcaattactcaccagtcgactgagtcagaccccgcccacgccattgccattgcgactgaataatagttctcaaaagggaaatcaaatattgattggctacatgcatctgggaccggtgggttatgattggtagagatgagtacgtcatctgtgaggctctcgtctgggtccgctagtcccaaagaggatgccaatatgtgagcccccggactccagggctacagtgttccaaatattttatgtggtttcactatatagcgaggtagtcacacttaagagccttgcagcgggggtccgagtcgttgattttctggcaaaattagcgggccattgaaaaagagttacctgacaaaccaagccacaacccaggataactaacttacaacattcgcaatcatggacctttgaagatccacacaaggggcctgtagagatgttcgttaggtacattttgtgccagccgattggcctagagatgcctactctctgtattagatagttacctatcttaatgctcactggtattcaagctcgcttttgttaatcattatattcccgtttgataagaataggccttttaatacagaggtacgtacttatttcatccaaggaagagtagtgaatataatctacccaataaacgttggacaaagcctattagataccgcaatccaactttctgttgtcctaagccgactagagccagacctaggaatcgcatggaagtaggagacaagtcagttagaaccttggaagttagaggggagtagaagtacggagtagagcaagcgagagccctggaaattgaatatgtttgccttctaaagttgaagtcttcagaaggaaagagcgtggagattgtttaccgcctggtgactgtgtataagaaactcttaccactttcgcactttcgaaatccatcagacttacatacatatctcatcgacaagggttgagaggtaaggaaggtaggcagtcctggaaaacatatcatgtgatgtgaacatacgatgacatatgtctgtacgcataatggtcgatagatgtatcgagtctaaagtagtaatagctgtagtagccagattcttccaaggttagattcaaggcctgattatctaagcatcaaaatgacctcggcttcgcacagccacagtgccacagccacagtttctgatctgctttgaccgtaaaccgtggaagtatcgaagacccgcaattgtttcaggtccaaaaataacattgaatgacaatcagatctcagtactgccagaacccctcgctcaatggaatcgatgtggtcgcatcttaacagtgtcaaccatcaactcatccacctccttggctccatgaaaacccaacatggcaccaaccactaaacccaaagttcgcaaacgcaagccacgtgcgagaaagaagaatcgtggtgtccgcactcgcgaaggccatgcacgtccgatagacgcaggctcgccggcccaaccgcttgccgaagtactcaacgagaagacaaagcgtcgcaaacccaagaaaacatgggccgcactcattcctgtctccgatgatcccctcgaaagggtaagtttgagctgtattgatatagaaggatatcacgctaaacattgaatcagaatattgttgagcaaatacctttgccagatgggtacgttctagtccccaagggtgatgtatacatcactcgacactgccgcagtaagaccaaagagtccgagcgaatagtatatgtcgtctacgtaagcgctcattcgaaccatcagtttcaagcccagagaaggaccgctaacagccccagaaccgcacgggcaaaagaactctgggaatccgagtgcccgaagaaatctatacagaagttcttgaatcagccgccgcaacaaaagaatcacgcgccaacgccgtgcaagtgcgtgacgctaaggatctctccaaatcccgagaactcttgaagagtgaattcccgcttatgcccaaggaaaccctcaaaatcgtcctggaacatgccttcctcaagggatcggggcgtgtagggcggacagggatgatcagcgacgatcgaaagacgctattggctgtggaggcgcatattcgacatgttcatacgccgtatgagaagttgcttgaggagggcgtcagtcggaaggatgctcgtgagcaggtctggcctactatccaggccgttgagcggacttggcaggggtgtgagaagaggaagactacattggctttgcgtccggttgacaagtgagggttgcattttgttttggtgggattgaatgggaattgcattgctggagtttgttgtggagttattgaggctatgaaactatgagactatagtgtttgggatcactcgaaattcactgattactctattctaaccagtagcctaggtacagtagataaatatttgaggcctatatgatctacaggtgaaagcaaaatcactaagaatatcatttgtggctatccgtatgtaagaacgcggaggagaagcaggagcaaatccccatcccacttctcaccccaaaaagcttatgggtctcattgacccagtcacacagcctcaatctagaggcgtggaccacgaaggaacttcacctcgaaatgcgggtggcggtaaggcagacccgagaaccagccgaagccgtcccgtatcatgtcctgcatgatacccattctaagatcagcacgagcgagtgcctgatcacggctcgcctggtccgtatcaatacggatgtagagatgcggaccagctcgctcaggcagggactccagaactggcagtcccgctctctgaagacgagtcacttcagcgcgagcgacggtcagcacgtcgaggtccagagttggcataggacgaggcccaatggagaggtaaaacttttggcggtgcatgccactgttctgagcctgctcgtttatgcgagtcagggtggtggttggtgcaggctgagcctgttggggaggaggcctgccgatctccattggatcaatgtccattggatcgggcgggctcagattggtcttcacttgtaaaagtggcaaagcggctgctggccatgccaggtcggatagggttgcgaaatgaggtagcttggtgggcgtttgttgcgtccggtcgtcctgtggaatgccctcgggcttgcctgatttgtctggcaacttgtcttgagagcgcacccgtggcgctgctttggtcgttgttgtttgccatagtgctaaataatactgtcagtttatgcttgtctcatattttgctgattggaggtcagacatacgattgtagggcttggtatctctgtggaagagaaggcatatgggttggtacacatgatgataaaggcgaaccacagtcacaaagagatcagagaccatctaaacgagctcaaaagtactgtttctaagctcttgtggcacgtgatttcgaagctcgaagagtttacatgttttgggtgttgaagatgggagaatcgaggattctcaattcaaccagtactgtttgctattaaaagaattgaaagaacgaaagaataaactaaatagtaatagttattggcttcacgcgtttctaaatgtattatccaaataattaaattcgttgacacttagatgtatagaagcacgactatgttgtagccaagcttttctggactctcgtgccttatcggtttatagttcctgattgggagtgccaagacatacacgggcggtcagccccacatgcaaacaatcagggaacaaggtcgacggtgcaaatgttctctctttcttagaattggacatggatctggaatcacagacaacagacaagcattcaaatatctttacaaagtcctctttacctcaatctccccaaatatcgcaattaacaccagtgaaccccccaaactcagtttccagggtccatcgcagttacaccaatcaggcaaaaccaatgaaatgagaccttcccggggtctgtttgggggcttagactgatagcccaaagaaaattcacccctcaacggtctcttatttgtcatggctagtcctctcaccactcaccatgagaaatcgcgtgtttctggggtttccaaaccggcataaatatgccctggtggctgcgattctaactctatttattcttttcaagtctgtgcccacatccaagctcgatccccacaccaagaagctgtacggggaggaccgaccgcggtatcttcaccagtctacatttcgcaagaacccagaccatgactacgagctcaagctctctaatgcgcttcgcgccatggagatagaaagggaaatgcgacacgatgaggatgcaacacatacactgtggcagattatgctaccaggagtcagccagcgaagcgacgattcaattcaattcgaggaaaagaattcagaatggaaatacaaagtaagaccgacaacagacaattcatatcttgattataccaggtcaaccgactaactttacaatttacagctgatagaagccgactgggctgacaaattcattttcgacactctggaatccatcccagacatcgctcgactctacaaatcatacccacactccgtccaccgcggcgatctcctccgctatttgattctatggtactacggcggctactacgcagacctcgacatatatcccgcacgaagcatcaaatcatgcccgtcactgcgcgactccatcttcaaagccaacacggttaacgcgaatgtgtcgctagttgtcggaattgaaatcgacgagccattcgcttcgccgcagaagatgcgcgactggcactgggcccgacgctacggcttcatccaatactcaatttatgcgccacaacggtttagtccgctactaagagagatcatcgtccgtgtgttgtcccatacgaagcagcgagtcgacgagggtcatttctggaataggagatacaacgaaatggatacgatggagatcaccggccccggcgtgtttacagatgctattctcgatgtgctgtcggatacattgccatctacacatcggttagtacaacagtctgtggatgcggacgctgggttctcgtcctcggcttcgtctgtgcagcgtgtgacgtgggcgcctttccacgggattcaagagccgctctgtgttgagagttcagagactaagcctggcaagctaatgggagggctgtgtgttctacctgttaacgcttggggtaatggacagcggcattctggatccgagggcttcagtagtcaacaagcttgtattaaccatcggtttggggggacttggaagccttggaaacagagctggcggaagtatctctttggctgagaggatatgattttaatgtttacatctggtgttccggggtgtacaggtcatggcgttttatggtatcttcctgattaatgctaccaatgtctttgtttctaatattgatatcccatagactgtgttcttaattggaatactattcaagttaaaacaaacttgattcctttattgcaagttgatatatcgaagttaacttctaacctgctcttataaaggtgggctggaagagcgaagaacaagtgaagaacaagtgaggaataagtgagtgatacctcagatctactaggtaccagctctggggtagtgtttactttgagataaatactttaataatggcagtgaattggaagaagcctggaaccacctagcaaacatttatgtccctctatattaacccactcattcccccgtcgcttttcccctgaacatcctctctcctcgttctcgcaagtggcaactgtcaatcccacagcatcaacattgcatccaatttttcgggaatgcccccaaatcagtcgaccccgatcccctctgatatcacgcaatggaaaaaagcagccaagagagcagaggccacattgaggacgagcatccacaccagagacccgttcaaatcaggctcttaagatattcgaagaggaatttctgcttctgagattacaaccaacagcaacgggtgaaccaattaccgtacttggtacctacgagtgaggagagggcctatgacaagaatgaggagcttgtgaatgcttcacttgtcattttcttacaagcagtctgcgcgaagcactccgatgtggatagtgacaggaatcagcgtggtctgaatcattgactaaattgaagcaagatgttttattctggccgaactagtcagaccaggaggtcaaagtcgcattaaccataagaatcgctcggagggggaagacgactgtcaccattgaagaatgggcagtcgacattggagaatgttcccccactcctacatcaccctaagcccgccaaacccttacgttgagaggtgaaggccagacattatttcccgcgcgcttccaatgctaatttcatatgaagcagtgtgaagttgcttaccttagtaaggcctcaagttaccacgccaaaattcgatttcaagaaggtcaagaatgacgaggaaaacggagagcttagatcggacgtcttcagcttgtcatgccaggtagacggcttcctgaagtcgaagtcaacctttcgagcacaatcaatcctcgaagcgaaagctctaatgcgtgacaatcatgaactgaatgtctattggcaggagactatggaactggttacagccctgttaaatgcgcatcccttcccaaggacaggtaagcctatgcagtgatatcactgtatttgagtctctatactgatataactattagggtgacgctcttttctcagactggatctgagctgtacctgctcaacgcctcttacaaggacgggtatagacaatacatgcagggtgatccgggaaagcgctccttgaagcaagacagacttttcgcattgggataatatcgaatgagtctcgtttcgcctatatggtccatatcttatcactgaaaagacatacgtctggtactttgccaggctagccctggccgtcgctctccgtgcaagcgaagaggaggatgcaaggacctaggggttcaaggacgccctcgcctctgctgcgagcgctggttctgctgccggcactggtgagtatcccacgacatattaatgttgtctatccctatataccagaagcaatactaatatcttccaaatagactcctcctatcacctcttccgccgattcccccagctatagctactccaatagtagctcttcctatcgtgtccccctccgcgtccagtaagttgaataccctcgcattccaaattccgagcccttcctccgccagtctcttgagaggaagcatctccactacagcggcagtcgaccaatataggccaactccctgtcatattcttttggcttgcaagttctgttaaggggtgacgctaatatttgaataaaaatagacagtactgccttgattgtcctcaccgtgggcctcgcccaccagatgacactcgcatcgttgattccgagattcccactaagtgaccaagaggcggaggaactagctagcttcctccccgagatcattaagaactttgttgatgaacggcggcttggccgaggactcgaagcatgggctctgtagccactattagctattttctttgaagatcattgaattctacatttttttttactcctcattgaagtaaagcctggttcaatgccataggaaaaattaggtgatcttgtcaggcaccaacttgaattactggtcaatcttcaacagttttacttttaacatcctgggacctggcagagaagctcacagtccccaataagtgcatttcaactaaaatacgaagtatagagagacagaggagcaaagaaaaacaagggactttggctatagtactaaagtcaatcgccttgtcattatagctgcactgctacccctaaactctttgggtatcaaatcggtaagcaagacaaaaacgaccttgtccccggcgagtatatcatataccttgtatgggaaaaattgcggggagattctcttagctcttaggagttctggagttctggagccttccctatcacacaattccacagtgtgatccaaggtcatttactagggtttaggcagtttatcaaggatgctccctggcttgaggaccactgcggatgctaccactcgctggaaggagacgttccttcgtattataataagtagtaatagtgaattgtggacacacgaatgaatattgatttctttgcctaggcccacaaatcctagggtacctccaaggtaaccctacggtcctggatgaaggtagcaataaaactgggtaaatacccagacaggtcttctacttcctcgtccgttaattccaacccggggaccaacgaagcaggagtgatacggtaggcagctcccaccgtggggactactgcactagtggtgcctatatttattcgaatattagcattgctcctcagcaagacctgcagtcgattttctactggagatgagatgcttcctcctaagcgaacaacggaggaaggggtcataatttagaatgcgagggtatacaacttactggccatggagggggacacggcaggaggatctactactggattcgtgatggccgggggaggtgcctgcgaggcaacagtatgggagtcggtcgaaggggaggcgacaggaggagcagtggaggattctccttagaatgtattagtattgcttctggtatatagggatagacaacattaatatgtcgtgggatactcaccagtgccggcagcagaaccagcgctcgcagcagaggcgagggcgtctttaagctctttggcggctagatgtactattagtacctctcattctcttgatactggccgcggcagacagagctcttacctttctccctcgaaagtattgctgtatttatgggtaagctttctgtccaactcgagtggtctcagccatgataatgtgagactaacctctgatcttttttcctcctcgggggcgctaacgctttcccacttttttgaactgtacgcatcaatgtatctccccatcattaaatcatctcaaagattgagtgcttacagtggtaggggcattggggccattggagacgctgggagcactgggagcgctggaggcgctgggggcagtggcctggcacggttgtcagtgttcattcacatattgagtgaggacatgggatgaccacacgacatggtcatcaataaagatgagacttacgggagtctttcttttctgagacatggcgatggcgagtagaaggaagatgataagatgataagatgataggagaataggagaagagggaaaaaaggaaaggaaagggaaagagccccagggggaacataggcaggagcactacacgtcttccttatctacgaacttcagtttatctgacgtcttgcacgacattaccttcaccttcccttttgggaaggaccgtgaagattctctccaccagtactaatacctccctctcccacgacgctcgctaacggactcgatcctctcgacctaatgtccgaacgaacgaactgcgaatgatatgttggagtggaggtacactacaatggtcgattgcttgagagcatacccgccgtagagccttgctaagtatgatcattgcttgctgcgcaatacagctcagctccagaaagaggtccgtgtctaggtataggaacactaggtagatctagctagatacgttgattggtcggtgttatgagtgttgcttgaagaatgatgtgctcccttgtagagccggcttttcattctaagtgacatgcagatcgcctacgattgatctcctcacagctaatcttcacgaattttcgaatatcataatcgtacgcttggactttagaacattgaggctcgctcatgtaggaatctagcgtaattgagtacttattaggagggcgctttaggttcgcaatattgcgcaataggattaacgttgtctttgtattaccagggaaccatttctaatctaatagccagaaatcatttttcagggtcaaggttttctttgtccaagccggagggagagcttgatgctgaacgcgaggagatggcgactgctcttcaaccagaacaggctctatttctggaccatctcgggggttgcaattgttgtagcgaacgaaaagctcaatctttccatcgctatctacaaaattgtagatcggcgaggatcggacaaataaggtaccggaattgtcgaactttgcttgtaggagacggccgtgccttggcccaaagagcgagatgacgagaactgggaagaatgaggtatctccgaattctggctgttcgagacggcagtagagggtgtttgcaatagacgctaactcgctatgttgtagttcattttctttagcctttgtaccagtgagagtcacaagtttgatgtgagggcgagtggtcttcggatccttaaaatcgtcaagccattggcggatagaatgggcggtccatctcggaacatcccgaggctttgaatgtccagctttaacaccgcataacattcctgttggagtatcgttgaaagaattttcagccctaatagcctatgttagcgacgtagtcattaagaatagaacgagactcacttgatattattccaatgcgaaaggtcctgtatcgaggagatcgatcttcccctcttcctcttcctccccccctcctccctcccgtcctccctctcagcccgtgactcaaagacttcaagatagaaggcaatttgaccagctctctcccacatgaggcaatcctcgggaacatcgcctgtaacatcagcaaagtgtccttgaattcgttgatatagtgatacccgtccctagggagtgcttctttgtccattttgaatgtttcaagctcttcatgggtaagtggccggaagagacaagcctccgaatcggtgaatgtgtgatcctctggatcgatagactggacggagactcggaattgagctagctcagtatacgtgtaggtaggcttagactgagactggagcttatagacgatggaccgcactgctttcttgtacttgtctcttaggtgagcgcgttcctgcggatcaaccaaggaagaagccatggtggataataaggaagaaagggtaataatgttgcaacgtagagacagaaagatgattttgggggcaatgagtacgaaagaggagaactgattgcatcacaattgatgccctaaaactttaagttttagagagggaaaggatttcacgtgccagatctttaagagagaagaatgcattcaatacagaataactaagatggagagaaagaagaagcaagttgcaaagtgggaagcagtctatagaatacccgcaccgaaggtattctaaaagaccccggtcttgccaaagtccggatttttcctccgtcaagaacaagacaagaccgaagcccgccactctttcaggaataagaggcaaaccgacaagaatctaggttgctccgtcaaggacaaggcaaagccgaagctcgccaccctatcgagaatatactaacaacaagtgactccgtgaaggacaagacgagccgaagctcaccaccctttcaggaatagaccatctcatcaccccttcaggaacaagacaaagccaaagctcgccactccttcaatggaaagacaaagacaatcacaaatcgccttcttcgattaaggaactgagatttcccctaaaaggcaaagtttgcaactttttgggtgagactgaccgggtgggagatcgaggagacacattctagcaaagcatgcgctctcgtttgacgggtgatcgcgaccctgatgggactgaaaaggacccaccgtcagaatcgtcaccactgtcatcatcctcatctgctcctccctgcatcgcagcaatgcgggagaggtgccatctcagctccaaaagttccatcgaaggcaatggttgtttctccttgtcgttagttctcaccgtgaagacatgccctgagctaattacttccaaagtttccatatcgaaaaagtaattaaatctcccggggctcctggacggtggagttcctggacccatgtctcggactgcggcaggcggcattcggtcattcctagcgatggtggcgcttcggaaaggaagccaatgaaatgcgattcgcatttcagtttcttcttcgttgaccgaaattggccggaatgcaatgagtccgcggtcccattgatcgtgagctgtgagatccagcgtgatcaggttgcatacccgctcagtgctcactagcacaccacctggcatcagggcttgctcccatgcatcgaccttttcttcggaccagaaggtgcgaagaaagttccagacgctgtttccatcatgctcgtcccgcgtggtcccattgatcctattcggtataatatgggctacctcaagcgatggtcctccacggcgggtcagaacgcatctagcctcctcacgatctgtcactgtcaccctaatgctttcctcggtctagaaatcaaagagatcagcagtgttccataataaatactcctgacaaactcactgggtcaccaagtatcctctttcgccgaccactggcctggggaaccgggattctgggctctgaccgtaaacgagcggcggtactggcttgtgccggagagccagatctaccacgatcaccacgttcagggcgtcggctcgagatgtcagcagcggcactcctctcgccgcgtgcgcccatatcgggtctggtttccagtaccctgggttggccagagcgagatgcttgtccatcactggcccctaaataaatgacagatattagttcagtgatataagggcagggcagacctcgtgaatacgcacaaattctcggaagattgtattgggagaaatcaaccagcatgtatcgaagcatgtgtgggttccgctcgtggcctacaaggacctccagggccttgatgtcagcgaaccatagacccagcgccttcacgcgtgggatcctgtggttgccgacagcgacacagatacgatcaatcaacgatcgtcggtggggatccgaaaattcggaaaaaatggtttgagtatcgttgttcatattatgtgattacgaaaagatgagagagaagagagagaagagaagagagagagagagttgaggggaacttctaaggttgaaagctactgcccgtttgggcgtcggggtgtatctatggatgggaaagaacacagtcgttctttccacttcactccacccttccctccatttacccaaagtatacaagaagaggagccttgagatatggcttttgttcaaggaaccagaagttggtcccttcaatccattgattttaaaagaagaggtagtctaagtcaggcatttcaggaatcgctagccacgtttttatatcgtgcacactcctctggcttgttgttccaagtcggcttgcatagcctttcgcgataatctcactattgacttgagtacgtttctctctatgatgtaatttggatctcctgggctctcatacttacagacaccgtgatgatctgcatttaaagcccagaacagaagaatccttttccaaaatcatctttttcaatcagtaaattccatgcggcgtataagaagatttgaagtatatcttaccacacgagcacttttgagcctgagaaaagtgggctaggttttataaaataaaacgaggtctagctttagggcgatatatcgggactgcttattaagcttttgtcgagtaacttagttttccaatgcggatgcctgtatcctgccttatttgactggcgcattttgagcaatttcatttgaattcacaggggacacaggtgactctcctggttcttgattccggaccatttcggaggtgaggggtggatatagtcctggggcttgggatgcggctcaacagtggcacatcgatgtacggagtcgatatggaccgtaccaaaggggtctgtaaggagcagactgggcgccattaatattaagcaatattgtgccgccatttcatctcttggcatttggccctcattgataaacagcctacatgaggctatacttgagaaagggatgatcgtcgctccaaagcgcttcaagagtcttttccttcggggtatttcggacatttaatccgaatggataatcttggagcggtgagagagatatgtagaaggttagcttcctacaaacgatcgagatctgagtctctcgaagctgatgacgaagatgattttgattacgacgctgctattgctagtctagcatctagggactagatggaatttcgcgcgggggatatgttacgatcgctatgtttgtttgcatgtttgttgtttgcagagtgccggctatataagcaggccctctcccacttctgcacttgcttcttacttctttccttctctttatcttagttattttgaattgatgcactctatgagagagaagagaaagagttattaaaagagtcttcggcccaatagcctattagtaatatcgtaatcaagtaactatagaacgagacttacttaatataacgccaatgcgaaaggtcctgtatggaggaggtcgatctccccctcttcctatcggactgtgactccaagacctcaagatagaatacaatttgatcagctctcgtccacatctgggaatcctcaggaatcctatctgtcacgtcataaaacgtatcctcgaatttcttgatacagcgagactcgacctcagaaagtgcttctctatccattttgaatgtttcgaagctcttcatgggtaagtggctggaagaaacaagtttcggaatctatgaatgtatgatcttccgggtcgatagattggacggacactcggaactgagcgagctcagtgtacgtgtaggtaggcttagaccgagacttgagcttatggataagggattccactgcttccttgtacttgtctcttgggcgagcgcgctcttgcaggtcaatagatgaagccatagtgaatgataagaaagaaagggtgatattgtagagacagaaagacttgaatgatgaaagactgatgaaagagagttagctactaagcctaattaggaagtcgtagctccgaatataatgagcccgctcaataaaagtatagtcaaaagtgatatacatttaaatcctctagctataaaaatgaggagggaaaaacgatatctgaaaagacaataacatatgttgtactttggaaccacgcactgtgatagtaatgtgcagggacgcgctaaaccagaacaggcacgctaagctcttttgggcaattcaccgtccgagtgtacggagtacggagtatacaatatagacaacaagagtcaaagccagtctgagtatagggaagaacatggagtagctgatataatcttcgggcacaaagagataccaggaaggtttgctagggggtttagctctccaaaccctaattcacccttgaacacgtcggacctccccctttcatccatgaggtggttctcaaagtgggatatcccaatattacattctgatattctgatattctaaagctatgaagctctaagctccaatatcgaccccatagaaagtacaaagatatgtatcatatccggagtctccacatcttacatgtcgtcattggtgagattggtctttgatcctaaacagagctggaccggcatccccgacggctcaatctcgcccaggcttgctattataggtcgagatcggcaaggggagagtctgactttgaccttccaaggcgctggatgtatgaacatgatatatgagatgattcacattcttttgttcctgcatgaagcacaacatacattgtattccatactccctggacttcgaatggaacatcgaagctgtggatcagtggattctaatgaaaaaatttaataaattcgagtctccacgtaaagaaagaaaaagaaaagaagaaaaaggaataaaaggaaaaacgaaatttcttccctgaaagaaaaaaaaaggaatccgacaaacagagcaaatcccaaaaaacaccttcgctcccctccgactctccttccgatatcatttcccttactctttgccaacctacccaacacacaatatgaattaactccaatgatcctatctgctgtccccaattcctgtcattctcaatcaattaaggttgcctggcagcttgatcttcaatggttactgggtctgtgttgctgacatgagttgggatcaccctgtccacaggtatgcattctcccttgatgacacccccttgtgggggtatcacattgtagtcctctattctttttatttttacaattctgtactgtatgcctatgtgacaaaaccgctcatggattcatttatgtttagcttcagctatcccaacggtgaacctcaaactccgacgaggactccgaataccttcgactcgtttcacaccccgaaactcgaatccagcttttttgacccccgggtgacttgggatacctccgatccttatgcttccagcccggagcttctccgcacgccgcagaagtttggtctaggctcgaattcactgaaaggtcacaatggggagactactggttacagggggaggtcctcggaccagaccgatacggccagacggattcgcccggtgaagcctctgccgagtatgggcgaggattaccctcggacaacgggatcggccaagtcagcagcctcgatgcaaaccccgccgccgacaagtgcatctagacgaaaagtccccgagttggatcaccccgatggacagacacaaggagaaacgccgggcatgggaggtcatttggaaacacccagtcgtcttcttggagcatctcctcggatgtttggcaacctccaatcctcgcccgatttgtttcagctggcttcattggatcccactggctcgcctttcttcccacagcaacgactgttctgggatcatgatctagacaatacgagtgaggttcctttgcccagcaacgggaataatctcaatgctcgtcagacttccgtttacccacaacacatcccccaattaccaaccattggttcagttgatgctccagactttggcaacggttttggaatgtcagcaccacccaccgatgctgccctatttcctgagccattctctacctctccccggctcccggtcaccaaggctgaggatccagctctgtttctgagttccccagctcggagattcggaggtcctcaacttacaccagagacacgatctcttcgtggccttcgacagccctatcaccaccaggcagaagagtccaggcgggaggagcttatccgagcacaggcacccaatggccaccgatccgatcctttcacggttttcccgggcgagagcgaggaggaggatgacgactacacacccaggggaatacgaccagttctaacccgcagtgcgacccaccatggcatgtctagctcatcgcggccgcacagtcaagccgggggctttatggcatccaccaacggaatccgaaagagcccaagtaaagggcgttcgtctccagcaaaatccatgcgtccagcccccttgacacgatctagttcgatagccaccggctccttgacgcgctcgtcatctgtggtgcttcgcattggacgagatggccgtgcaaaggctgaaatggagcccctcagtgaggcccccacagggttgaccgatcccctgactgggattgatctggatggctcttcaaccgagagtgaatcagatccagctgagttctcggaatatcccgtgttgcatcgcgctcagtcgtcattttcactttatgatatctcgaggcgtccactatcccggagtgattcgggctcccggcctctttcaaagggctcctatgcttccaccgtcggctcatcacactcgggtcggatgtcaccctgggctggctcttctatgggaggcgggcgagcaacgtatcgtggatctcctgatattaagcggacacccaaacggcattcgtctctgctgcactcggactcgacatatactcggggtagcgtggcatcagacttgttacccggagaggatgacgaaagtggtgatgctcaatctgcgctccgacaggtcctcaaagaacgcggccggggaccaagatccacgaacgcgtttggtaaccgactttctcggtcatcacacacctttactcatctccgctcatcaccaccccgccttggcagtgattttgacatacatccccgtcacaatgcttctcccacgactttgaccgaccccgatcttgcaaccccaggcacagagcgtcacagcaaccccagtaacggtacacgatgtgtctgccgctcgatggataatggtggccatctcatgattcaatggtgagttcctccatcggccttgatttcaaagtcgattgtactaactctcccagtgaatcgtgtacacactggctgcatactagatgcgttggattggagcgtgcaaacctgccctccgtctatgtctgtgtcttttgtgctcaaacaccatcccgacaacaccgtgcccgaacaacttatgttcccacggggcaagcccctccctctcccttggcccacaagtcattccgcttccggtaaacccggtgcgttgactgccatcttggattgcatatatgtcttggaaagaccggtgccttttgatttcttttgtgttctttccccaatcgggctctcttaaactctgcattagccgggccaccctgccccatttcataatcgcccgaaccccattaccctcatgatacctatgtactattccctcacaaccctggacgaaatcagaatagaatcatttttatacttctccgcacatctgtattatttgtagcctgcataacccccccccccacccccccccatcccnnnnnnnnnnnnnnnnnnnnnnnnnnnnnnnnnnnnnnnnnnnnnnnnnnnnnnnnnnnnnnnnnnnnnnnnnnnnnnnnnnnnnnnnnnnnnnnnnnnnnnnnnnnnnnnnnnnnnnnnnnnnnnnnnnnnnnnnnnnnnnnnnnnnnnnnnnnnnnnnnnnnnnnnnnnnnnnnccccgcatatcggagtagctaaccggtctcgggagaggagccggcccggggtctaaccccaggaaggcccgacttatttaatttcataaaagcccatcgatccctctttctcagtcagtttctcaattttactccgcttgacctcctagttgactgaacctcgccgtgtttacagtagaccctaacaaaaagccctatcaggtaccccgggccggtgaattgtatagatcgggctacggtctgattggtcaattcttacttatcggctcaccgcctttttatcaaaaaagcacttttctccgcgcggagtcatattgcgctctttctttttttgcgcgccattcacactctttggtctcattccagtcattcgcgcttcgccgttcactcgctccaatgtctgcctctctccctggcagtcgggacctgcctgcgtcgccatatgacctgaagacctattggggtcgcgtgcgccatgccgccgacctttctgatcctcggtaagttcaaatagaagatattagtggcattgagagatccccagcatatactgatcataccaattatgttaggactatgtttgtttcgtccgccgggcttgaaaacgccaagaacctcattgcttcttacaagcagaaccgcatcccggccatgacaccggagttgtggtcggcgaagaagatcgttgatgcgacattgcaccctggtatgggctcgttcaatgtcaggcaatagccattggctaacttatgaccgatcagatactggaatgcccgtcttcttgcctttccgcatgtcgtgctacgtgctctcgaacttggtcgtcactgcaggcatgctgactccaggattgaaggtaagcacctctgcatatgcaacatatgaacaacgtactgacaatacagacaaccggaaccgtcctctggcaaatcggtaaccaatccctcaatgtcgccgtcaacaacgcaaacgccaacaaatctacccccctctccatgtcgcaaattggcaagtcatacctcctggccgtctcggcctcttgctccgtcgcagtcggtctgaacgcccttgtcccccgtctcaagagcatctccccaaatacccgcctcattctctcccgcctcgtccccttcgccgctgtcgcctccgcctccgccctgaacgtcttcctcatgcgcggcaatgagatccgccatggcattgacatctaccctgtcctgtcagaggccgaacgtgctaagcgcgagctcggtgagcacgcagagccagtccaaagcatcggcaagagcaagaaggcggctacccttgccgtcggtgagacggccatctcccgtgtcctgaacgctacgcctatcatggtcctaccgccgcttatcctcgttcgtctcgagaagacggactggctgcgtgcccgtccccgtatggttctgcctattaacttagcgctgattctgggtacttcgctcttcgcgctgccgcttgcgctcgctgcgttccccgctcgccaggctatcaatgttaacagccttgaggaggagttccacggtcgtggtggtgacctaggcatggtggagttcaatcgcggaatgtaagttttgatctttggtgtttcgcagcgtgcatatcacatatccttgcataggtcagaaaatatatatacctgttccccgtttataaatgtcattactgttgtccatatagaccattcaatgaataacaggtaccactctgcccttaataatcccctcaactcgctccgcaatatcaagcaattcatcatctccccaacgccggcctatcagctccaacccaactggaacaccaagcgcagcagacgcagttttaggactccgcccagctgtattcccatattagtccaacaccaagcaccgaatatatataatcacctaccgggaatacaaatagcaggcctccccgtcaacgcagccaaaacaccattccgcccagactgcttcttcgcaccaatcttcacaggaagccgtctctggtgcggatacaccagcgcgtcgatatcgtatctatcaaaacattccgccacagactctttgagagcagcaatatactccagtcgacttcggtacgcctcgctcgtcagcgaaaacctctctggatcttccaatgccgcagagaaaacatgcgtcacggcatgaggatcgaactcgccgctctgggcaatggattccagagatcggtgcggtatcgacgaaaccagcggcgactgcaggaactcgtctaggtagtgcttgaactcgaaagcctgtgtatcgccattcgcgaacagggtttcaggactccagtccggatgactggacggggcgataggcacgaagatgatatccgcatcgtgttcctgtatcgaatccaaactcgagcggataacatcctgcacgatctcgttctcggcgagatactccgcttccgcttccgattccgattcatctgtacagatttcaggctggaaataagcctccaagattccaatccgaacctgtcgatcctccctccgaggtaacccttcatctacccccaaagaggatataccatccccatccggccccttcataaccccatacaaaatcctcacatccccaacacaccccgccatcggccccgccgcatcctgcgtccgcgaaacaggcacaatccccacacacgagaccctccccgtcgaaggcctgaaccccacaaccccacacgcggacgccggcgagcgcagcgagttcatcgtgtcggtcccgcacccgaccagcccgaagcccgccnnnnnnnnnnnnnnnnnnnnnnnnnnnnnnnnnnnnnnnnnnnnnnnnnnnnnnnnnnnnnnnnnnnnnnnnnnnnnnnnnnnnnnnnnnnnnnnnnnnnnnnnnnnnnnnntgccgcccccccccccgacccccccgaaccccgccgctagcgccgcggcggtcccgccagaggatccgcccggggtgcgggtcttgtcgtgcgggttcagggtttgcccgccgagcgaggagcgggttattccttggagggcgaattcgtggaggttagctttgccgaggattattgcgcctgcggcgcggaggtgcgcgacgacggcgctgtcggtggttgtttttaggttttgcagggcgagcacgccggcgcttgttggttggtcggttgtgctgtagttgtcttttaggattagggggatgctgtggagggctgggaaaggtttgttggtttggttgtaggtgagtgttgtggtggttttttggagagcggtttctagggctgtgctgtttatgctgatgagggctttgagggtcccgttgtgctgggtgattgctgagaggtatttctttactagccttgggccattggaggggtctttacggagtagttcgtggaatttggggattgttagctcttctgcttgccatggggagtccatggtggtgagtgttggatagaggggaattggggaattgagaattggtggagttccccggatgttgatctagtgggccaattcacgcacgccatatatggatctgcagtttcattgatggagtcaagtattcgtaattcatatttgccctaaatcggcaatgtcaattggcaagtgagcttgccatcatgtagaacccctggcgcacatggctcgggttatcctccgatgtataagaaaccgagacgaaaggcacagtcatatacagatctgagaagaattagaaaattgaaacgaaagaaacacatatatacacacaccatacggttaacaaatagacgccacaaacaatcaaatggtataatcatccggactcagcctagaccctcccagggctcccgaagccggattccataaacaggacgggaaaagcagaataacatgtaaccggcgcctttaagaatggatagaaagatagataaagcaaataaagtaaaaccggatagcagcagaggataggtccctcaaggataaatgcagcgattccggttgctcaagggccaagggttcaatacccctgccatgtggtgtcacgaaggcagccgacgcctgcatgaggtgacacctgcaggtattgaggggaaccctcccagggaccgaaaataaaataataaagagaagaaagaaagcatcgtgatcatgattttccgaagtgcaaacaccattccgtcccattcgcgatagagaaaaagattaccctcaagatatgagccttccatccgtagctggatcctgttcacgccggtgaattcccttctgatgccgttgaataagccgaatactggctactgtagctgtgtggatcgaggcctaagtgcgtgcttggcgatgcaatccttggccgatccggtaagcctctgtgccatcgtcgacaagtgtctccttgaaccacgggtgcttcaatgcctcctttgcggtgatccggctcttgggatcgtatacaaagatttgttgcagcaaatccaagaatgaacggttgaatggcgtgttggtagggatgaactcctatagacgaaatcagtcaaaagaaagccccacaggtagatatgggggacacttactgtcaaagacttcatcgcgcggacatacttccgcgaggctcgggtcgtttcagcgttgggatagtcgatcttgtttcgattgaagtacctggtaaagttagtccctatcacagaaagattgaaggggcagggctatttacttagcagcagagttgatactaccacctcggcccgccatgactttcttcaccaaagcagtgtcgattcgattgccaatgacggactccatcatcgccaggtgttcaaggttgtcatgcgtctggaacagggcatctccggtgaagaattccaccaggatacacccaatactccagatgtcacacgggaagctccaacccaggttcaatatgatttcaggagcccggtagtgacgggtagagacgacagatgaatggtattcgtcatcgaaggtcgccgaaccgaagtcgatgagtcggatttcaccatcgaggagaacgcggcgctgtcgcgcgttgcgagccgtggcatgggaagaggaagggatagtgcggttgtaagtgaaggtttggtaggcgttgctgacgaggaggatgttttcgggtttgaggtcggtatggataaggtttaggtcatgaaggactaataggtcagtggtctaaaatgcagatttagaagtgttggagaacatacaggcaacacttgtgaacagctgccgggcaaactgctggatctgactgctcgggaatggcacaaagccattccccttgaggaaatcaaacacgctttgtcctagtagatcggtgacaatgcaaatgtgattccggaaatcgaagcagtctcgaaggtggatgcatttgttgcggttgcttttgtcgttcgaagccagagttgacaagactcgcagctcgattcgagatgcgtcacgatacttttggatcgatcgtatgattttgactgcacagcgagccttgcgctgcttgtcataggcttcgaccactttgccgaatgtaccttgacctagaagtttgatcacagaatctcgagaaaggttagcatggtcgacaagatgccagagatacttttacttacatcgatctgtcaatggcgtgtcgggtgtgacaatgtaatggccatcgtcatcgtcaaacttcttgatctgggaactggtgtactgatcgagcaaattctgtcagtggacctgcacaaaagacacggtagataaaacactcacatcgcgaacgactggcacaggaacatcctttgccttgattggcggcttcggaggtgggacataactcaggaaagcatcgcctgcggtctccaactctcgtcgcttctgctcgtcgcgagtcgatttccgagtggcgcgtttccgcttttgaccgacagagccatcctcatagtatacaccattgctcgcccccgaactgccctgcgaaccaagcgaagttggagctgttgtgtgtaaagatgcggttcgatcggtcgataaagacgtggcagaggattcctcgccgtaatgttggggattgattgagaatgacgggcggtcatagtggcccaggtcataggcggtttcaatccccgttcgccgcctcttcccagcgggctgagcagccgcaggaggtggtctggcagaagtatttgcaggaggcgcggcggcaccattggatggctctggaccaggactgtcatcgatcacaatgacttccttgggaagtccattcttgtagaactcggtccaatctggtttctttcttcgacctccaacagagggagccacactggaaccactctgattggtcatagcagacggggttgttgtcgcggggggaattctcggcggttgggtgtagggaagggtggtcgttgtcggggaggggacggaaatggcgtaaggattcgcaaggcgagtccctgcggccgtggtcgaagtcgggtacgaggtattcggttggtacgaaggatggtgaggatatccgtaagcctgatgatgagaaggatgcgttgcagtggcagtagacggagtggacattgtgcacgaaggtatcccgtcacacgaacggtatgaaggttgtggagagaagactggtctaatttgtgaccgctagttgatgtcgcgcgtcaggcttcctgggtggatacgaggatctcaaggcaggactagccagccagagaagaaccaaaccaacagagattggagttgacaagcgtgtccggagggagatctctggagacgtgaagatgacgggctgaggcggtgggaggatgggaaagacagtttcaaatgcgttgcatttcctcgacaatttcaagacaaggaggtgaagcaaagagcattggggaacttggcgacatctgtggtaaacgaggtggggagggaagggcctggaggcaaaggtcagtgatgatggaagagtcggagagttgggacccgttgccgatcaacttgggatttgagatttgagatttgggattttgctcctcttaattcgtattatcttctatagaattacactcgccgcctggaatacagctaattcaggctaatttatgattgtcctgttctttttacttcttgatcaagtttctcaagcgttaaatacctaaatacccatgttatacgatgttcggcctattccctatagtatacacagaaaaacctcaacccagaggcccatgcgcctctagggagaaaggcggatattactttctcattccaatacagccatgaatgtaattaaaaggatctaaagtcctagatgggccttgaggggcccccccagggcccgccaccggaaatggagcatcgcgtccaagccctggcttagccgaatccaatccacaaggcgcggtgaacatctgcggtcaagaatattcagaataccaagaataccagtatcgaagagtatatcaaacattacagcccctaggagatccaggaaatcgcccgtatagttaccacctgacattctcactgagtcagcatctaaatcgggaaatacgcaagccaattgcgtacaggcatattagaactagacgctaatcagttagtcttcgatgggctaatggtttcatataagagtgaaaaaaatcaaccggggagaaggggttttatagagactataggaaatgagaccttacatatctatgtccaggttgccttgtcattacctaggctacagttactggattaagttcccaagagatatataaaagtgaggcaatccaaacagcctaggtagacaccaatgctaataacacaacatatctatgaattgatatccaatgattggcagggtattccgtacctttgactgcctcggctctaaattgcctcaactggacatctttaacgccaaccaaatttagtaatttgatatgcgcctagttaactagctatttactatttagactggctagcgtgtggctgtgagaactacaagatttaaatagcgatcttcacttggatgtttataatcgggagaaccaaacacatagaatatgacagtagagaattaatatgatccaaagcaagtctcatttattgccttgcgctagaggaaactatccaagagcgacgagagtaatttaccgaggtatgaaaaaggccctggttcctctatcctcttaagatgtaagctcaacctgtagttgagtggaattaaagatcatggcctgacaacctgacaacccccataaaccaacgccatcatacacacgcagagaatgcaagaactcctggtgcccggagccacagggctcccatgggccaacaaaaattaggggcataagaaaataagattacaaacatttatgacccagtcagtttcgatcgcgatcctctctgggatccttcaggtagcccctctgcacatgtctggtcgcccgtccatccgcctccaacatgaatagaaggtctctgacctgaatacccattcccttctcttgatcttcacgccatattccgaggcgacgctgagcgtgactgggtgtggattcaccgacaccggacttctcaggaccggcggtgggcgtggaaggagttggacgtgagggagacgagaacccaccggatttaccaccgggcttcaaccatgagtatgactttttggcgccgaacatactgcggccacccccagacaaagccatgcgtgccgtcgccacagactgtgcatgttgttgggcctcggttgctttggaatcctgcattttcttcgcttcttttttgctaattgactttttatcgaaactaggcgccctttcgctgaggggcgtcgagggcgcagatcctggatcgacagactcggctcgaccagcctcatcaaggatggcattgctgttgcgtttagcacgcttggctgcgcgtttttcctcttgcgaactctcccggtgtatgaatgctctgtaccttgccgcatttggctttgcactgggcgattcaatgctagcatgaggacctgtcaagtaattagtaccaagtcagttaagtggatatgataagcgaaaccatacgtttcacgggggtttgagtgctccccgtagcctgcccagggggtttcgcgacatctttccactcaatgggaactaggccatgagaatgtgctcggcgacttcgagcaagagtcgaggcgtagtcgatgacacccctgaatctttcttcggtagaaatagataggagattcagtatgtccacaagaggagcaccttcctggttgagaattgtctgaccagtgcgcaccacagaagagccatccggaccagtaacttcaatcggctgtggtcggccaggtacagggtgaaaaaggccttccgaggggattcgaacaccaaggtcaaaacctcgtttctggagcttctgttcgaggagttttgtgatcaagaacggttcttggatatgatactgtgctcgccttgctgcgatagtgtcctcgcgagtcggttcgttgggatctttgaaggggacatgtgcctgagatgagcccgcgaaagagtcgtgtgtggtcgccggtttgatatgaggcaaatcaccgaagctagtcgaaggggttcccggggtagagccttgagaagtgaaggaggtattgatagatggcgggtattgagactgtgatccgcgatggggagcctgcgcctgcgcattctgcccggaaaagctctgtgtgagaaatgcttcctcttccctcacatcaattccagatgatgctagaacatctgtcagttcagcagcatctgttgttttgtccactgggcgagacggaggacccatagtcccgggaggagcgggagcagatgttgcagacatgttcatattcatgctcatattcatcggcgttccgttcatgggagatggattatgtggtagctgaaccgcgttgaagctcggagaaccgtagggagattgggtttgagaaggcggtagaggagagaggcgaggtcgcttggatggagggggtacagcaccattcaggggagatgctgccgagttgggagatggggacgagacaggcggggagaaaggttgagaagaaaactgtggcggcgggggtgcctgctgctgtggatgccgagcttgggccatggcgattgtcgattgtcgattgatgggatttgaaatgaacagaggctattgcgccgagccgttgtagctttgcgaatgaatggaggtccacgcgtggccgttaaactgagcggattgctcgcaccaccagccaccacctttgaccatctcaatactgaattcaaaccatatgtacgacacgtgaatgttagaattgttggctcgcgcgcgaatctagcagtaatcggggagacagtgatgcgtgacgtggtaaggagctttctaggtggtcgaactctgctccgcggatcgcggattgcgacacacgtgactaagtttgactaagctctctgaatctgcgggtgtcttggtcgcaaaagatcaatcttctattgaatcacacatagtcctcataagtatattgacacctgcttcaatacccggagctgctccattcatcatagcctttcgcgcaagttatgggtgttgcgctgagctcttattgagatcctaggcttgatcgtgcgacgcgcgggtgctagtccccttcaactagacttcttaaactcatattaaggaatcggtcaacctactgacaccttgcccaattaatctctaacacctctaacacctctaacaccatggcgtccaaacgcaaagctgcagcaatgggaatggctggtgacgatgagcccgttgacccatcagacgaactggcattctactgtctcggcggcggcaatgaagttggacggagttgccacattgtgcaatataagggcaagacagtgatggtaagcctcagctgggacaaggaatgaactcgcagatactgatctcctttgcttctgtagcttgatgccggtatgcacccggcgaaagaaggcttctctgcacttcctttctttgatgaattcgatctgagcacagtggatgttcttctaatcagccagtacgtgcatctctttttttgttttacatatatggaatcatggcaagcacgaccgggcatcattctgcacttaccatgaggcacctggcacctgctgcaacggaaggacacattcccctgcatatatatgagaagcccaatacaatacattgtcatgcatatatttcttgtatcactgtaccctcttgagtttcgaattcgaatgctctcctggcgcgtttgttcacggctatcgcagttgactaacggtctgatctgtatagtttccacgtcgaccattcttccgccctcccatatgttctcagcaagacaaacttcaaagggagagtcttcatgactccagcaacccgagcaatctacaaatggctcattcaagacaatgtccgagtcagcaacacatcctcttcctccgatcaacgcactacgttatataccgagcgtgatcacttgtcaacactccccatgattgaaaccatcgacttctacacaacacatacgatcaatggcatccgtattaccccgtatcccgctgggcatgttctcggggctgccatgtttaaaattgatattgcagggcttgtgactttgtttacaggaggtgagtttgctttgttacaccttggtcatcaacagcattatatgtcaattgctaatcgaccgatagactactctcgcgaggaagacagacacttgattcccgccgcggttcccagtggcacgaagatcgatgttctcatcacagaatctacattcggtatttcctctaatccacctcgattagaacgcgaggccgccttgatgaagtcaattacgagtgttctcaaccgcggaggtcgagttctgatgccagttttcgctctcgggcgtgcccaagagctgcttcttatccttgatgaatattgggaaacccacccagaactccagaaatttcctatctactacatcggaaacatggcaagacgatgcatggtcgtgtaccaaacatatattggtgctatgaacgataatataaaacgactcttccggcagcgcatggccgaggctgaggcgagtggcaataagagcgtcagtgtcggaccatgggatttccgattcgttcgaagtcttcgcagtttggagcgtttcgatgatgttggaggatgtgtcatgcttgcctcccccggtatgttgcagaccggaacaagtcgtgagctgctggaaagatgggcacccagtgaccgtaacggcgttgtcatgaccggttacagtgttgaaggaaccatggctaagggattgctcaatgaacccgatcagatcccggctgtcatgtccaaggtttccactgggcatggtcgtggtcgtgttccaggagtgaatgatgaggatcaaaaagtcatgatccctcgccgttgcactgttgacgaggtcagctttgcagcccacgttgatggcgtcgaaaatcgtactttcattgaggaagtaggagcaccagttgtggtaagtgtgacatccacccagtctatttgaaaatttactgacccactcaagatcctcgttcacggcgaaaaacatcagatgatgaggctgaagtcgaaactgctcagccttaacgcagataaaatcgtcaaagtcaaagtctacaccccagcaaattgcgatgaagttcgcattcctttcaaaaaagacaagattgccaaagtcgtcggcaggctcgcagagcttgcgcctccatcggagaatgatgatccccagctaatggctggagtcctagttcaaaatgggttcaacctgtcgttgatggcccctgacgacctacaggagtacgcgggcttgacaaccacgactattacttgcaaacagcatatcactctcagctctgcgagcatggatttgatccgatgggccctcgagggaacttttggggccattgaggaaattggaaacagcaagaagaccgaggctaacggcaagaacgacatggatagcgacggcactgcaaagcaagaagatgccgacgaggagatcccatcggacgagacgcagacattccttgtcatgggatgtgtgtatcttcgccatcactcccgcacccgcgaagttgagttggaatgggagggtaatatgatgaacgacggagtggcagacgcagttatggctgttttgctcacagtcgaaagcagtccggcctccgtaaagcgtatgaatttctgtccttgtccacctctttacttgtgctaactacggttatagaatcggctaaagacaagcaccaccatcatcacgatgatgatgatatggaaataccctcacttcccaaccctcattctcagtctggacctcaagagcggcttgctcgtatgctgatgatgctcgaggcccaattcggcggcgataacattggccccattgagcgcccacgaatcccggcggatctcgcactcggtccacaagaagatggagagatgaacgaagaacgaattgccgatattgaggctgccgagctggatcgtcttatcacaatgggtgttcccgtccctggtattgaaattagggtggacaagcatattgcccgtgtgtggcttgaggacctggaagttgaatgtgcgaatgctgtcctgcgagaccgcattcgtgtagtcgtcgagcgggccattgagactgtcgctggtctgtgggcagagagttcgattcaccaggacgcggtgcttaatggttctgtcaacgggacaaaggggattgaactggctgataggaagaaagcggctgccattgaggctcatgcttgatctctgtcatacttgtataataatgaaatatttccatcatccatgatttgacttgacttttctacatctgcttcgtcatgtagtgtttctttcggtagttggttttttttaacaagagaatgagattgattaaaatattgcacgttccgaggatataaaagtagactcttagagtagatagatataagtgctttatagcgaggcaaagacctcctgcagaactttctccagggtgtcaacaataatatcaatctcctctttcgacacaatataaggtggcgcgagtataagatgatctcccttaattccatccacggtaccagagcagccatatagcgagacactgtactccggctgtagacccttctcctggatccggtaagacagacgatccttggggtcaaatggctctttcgtagccttgtctttgacaaattcaatctggaaagagttagtacatttttttgtcgtgcaatatctactacaggaacctgcaacttacaccccagaacaaccccttcccacgaatatctccaacatgagggtgactctcgaatcgctgcttcaattgtgtctcaaggtaagcacccatggtccggacattatccaccagagactgctcctgaatagtcatttgcacagcaagcgcagcagcacatgagaccggatggccttgatatgtctgtccgtggcggaactgcccggtgcctttgtccatcgtctgcacaatagagtcaccaatcaagacggccgacaccggcgcatagccaccacccagaccctttgcaatggtctggatatcgggaacaacatcttcttgctcccagacatgcaaagtgccgcaacgacccatgccgctcataatctcgtcaaggatcaagagggcgccgtgcttctcgcagacggctttcatggcacggaagtaccccggtaccgcggggacacagccgagagcctaactagtataagttggatgatctgatagcttagagttcaatataggaagtcataccgcgccgacgaccggctctgcaatgaatgcgcacacagtctcgggcccgacacgttggaactcagcctctagctcggctgctagacgtgccacatagtcagcatcagactcaccgtccagtttcccacggtatgcatagcatggtgaaacatgggatacattcttcgagagaagtggttcaaacggctgtcgacgctgaacatggccaccaacggaaagcgccccgagcgtggtgccgtggtaggatggaagacgcgcaataaacttggtacgctcgggttggggagttggaagctctaagaaatattggcgtgccagtttgagtgcagcctcgacagcctcagaccctagatatcctcagcactgtatgtgtgaacagaatttcgggttcttggaagggctgcctcgactcacccgaactggttataaagaccttggatagttttcctccagtagagtccactaggagtttggcaaggtcctcggccacttgggtgccgaagaaggcagaatggcagtaagatatctggtccatctggtccttgatcgtctgggtgacctgttcgttaccgtgtcctagacaagatacagccgcgccacctgtggcatcgaggaatttggtcccatcttctagaaagacgtagcaccccttgccaccaatggctttctttggaacgaagcgtgtgtcccggtggagaatagcactagccttggtttctgggaaataatgtcagaaatatgccaagatattgcatgtgttgacataccgtcggtcatgattgaagtttatagaaatgtatttcaaagaaagaacgcccgaggagatcaaaagccttatatatacctgtggatctctctccgatggtctcacccgaggcaatgcccctgttctgcggggctaagtgggttcggcataccgaagggaagaagccgggccctcaattggaccgggaacggactttactgtttcctatcttgtgtatctggtctatcgtgtttgaagagaaactttagttgtagattggcgtctggaaatgactcattcttatgaatgcctgggtgtactcgggaaagatatatctgacgttgagttatacttcgtggttcggtttggataaataggacactgcatagagcatggggctcatatatttcatagcaaaatattgataaaatagaattgaccaacagatccctaattatttcccaaacacaatcccaaaagacataactagggtcattattaactattatcaatcatattgacgtgcacttggtcgaacgttgaacagacatccccacgtcccaccgcccgcacactgcattctgcccctcttacttggccacaattcccgcggccttccccagacatttccccatctaacacatccaaccctccacaatgtcgcgtcgcgcccaaatcgaggaagtttccgactccgacccagaagagatcgccccttcttacgactctgacgaggaccttcccagaaatgccatcatcgcacccgtaaatatcccgagggctgcacctcaacctcaacaacaacagatgcccatgccccagcccatgccatcgatgccggcgcctgagcctcagcgcgagattccccgacacttctcatgcttgtaccccgtgtacttcgataaaacccgatcgcgcgccgagggccgcaaagtcggtgcggagctcgcagtggaaaaccctcttgcgcgagatatcgtcgatgccgtccagatgcttggcttgaatgccggcttggagccagagaagctgcatcctaaggattgggcgaatcccggtcgtgtgcgtgcgcaggttaggacccaagatggtcaattagccaacccgaagatcaagaacagtacgtggctgatgcctttgatggagtgaatgcttctttctgttggacatgaactgacattgttgcttagagcaccacctctatattctcgtcgcacagtacttgaaggctaaccctaccaccgaaaaatcaccctaccggctacgaatccgtggcctgcccatgcctgagaagcttccagcagctcctgctgccccgcggggttggaagatcgggacgatcctacctatccactcgcctgcctacagcggtggtggtgtcagtgacaaccccctcaaggacgcaatggccgagatgcagggcatggagggaatgccgaacatgtctgaaatgatgagtcaaatgggcggaatgggtggactgagcagtatgttgggtggactaggcgggctaggcggaatgggtggaatgggcggcgagccctcaggggcaggcgcggaaaagaaaaagaaggaaaagaggaaggtgatcagggcatgatttagcatgccctttattccgtgttccaattgcattgtatggcgatgggcgttgctttttccccctaatttttgatgcactcgagaaagggatacttcttgataccacggatctgcatctgaattgatctcattgtacatccacctcaaatcatgtccaacacctacctgatagttgtctgtcctgtatgaatcgaacatttcttggactagcaagtgccgataaaccataagagacctaccaagaaagaaggtggagtatcagttctaaacttgcatataactatgttatgcaaatgctttagtagtgctgagtttggtccgagggttgatctagcgggattcattcaagaagcagtgaacgataagtcatgttctcatgcaagggccggcaaatctatgtactagctaaaacggacatgttcatgggtatcattatcatgcggtgtgtgtttctgtgccgtccgggcatcctccatttctatactgccagagccgactaaagtccttgacgcgcagtactcgatccaactcattcggcggtgaccgtcgcacggtcaatgcgacagggagaaacgcctcgtctcgggctatcgtggacccaactcgacgcggaggaccatcatatccatttataccggcggttgcccatggctcgacttccatatccatgaatgaattggagtcgaggacgttcatatcaggacctagggtaaacatgttgccgaggtaatgcatgttgaacaggtggcctgaatgcgggcgcacgaacagccggcccatgtatcgattcgggatttccacgaagtgaagcactcctccctgagccacgatgtcaccttcattggcgtagtgctcgatgtggccgatggactgaccaaattcaggcgttagatcaggtgctgtgtttccttgtggccttgcgagctttgtccatcgcgggttgttgaagtgattcgcggcatttccgaaggtgtatacctccaagtgatgaaggagattgtgtggtagctcatccagaagccagtccatgacaaggcccccttcaataccgccttgactgtgaagaagcagaaccactttgtcacattctgggtctaagatagcttccttgaccaaggaatacgctcgtcgtatatcgccagtagcgtaggcaaaatctcgctgaatcagacattcaatgagatcaaatatgatgccagcgctagattccattagtatttgcaagtctgaaacccaacacgttacttacgtgcgattgtgcacggccgtcactttccgaccaaagatgtatgacagttgatcgatgttcatctgtacccagtggtgtctacaggtaatttgagttagcaactgaagacagagaactacggagatatatctcctaccccgctgcaattccatttatatacacccaacgctcccgctcatgacttggtcgctcgaccacagacacttgagataccaggacccgctggaagctgttcaacatcaacatgacaatcgaataattcacagtgaaagcaatagccgaataaacaatgatccacaggccgggaaccatgcagataaccatgatcggcagcgagagcaggaaagcaacttgataaaccaagagaaacacatgggtcaacaccgtagatgcattgcgtaacgacggatagagctcgtccagctcacgggtgtgacctagattgaggggccgtagaatacctggaagcgcccatagcttcgaaataaacagggacaagtcgctcgagagtaacttggtgggtgaggcagtgtagggcaacggggtatcctccttgcccggacatgtcattgtggaacgttgacaagagaagaagtgtaacgttgagatgaaagtggacatgaaaaaggcgctttgttgtcttgtcatgtgatatagcgcctgcctataacctcgtgttcgtgagatctatacgagcttgtgacttacatcggctgattgacctacaggacttttttggaatgtggctttttggtttctttcatattaagtaattacagtgatattattgttctcattctttgattccttccttcgatgaaacttgaatctccgtcatttcgcgaagcaaacctgggagaggcgcttgcaatcagcgtggtcgatgttctgttatagtcaacacacagttagctatagatcagataatgggagaatatgaaagggaggatattaacgaacaccatgacgcatttttcgacgattgttgcggcggaacagatatcttcggttgatctgcataccggcatggcgaatctcacttgaataccattttgcaatgtctttggcggtactggcaatttcaatgtcgctcaaattccagtatcctgggacacgcagggacaggcaccatttgacgtcgtgatggacgggctcagatgaaatgataccgtctcgggcgacgatgcgagccaccacaaggtccatcaaatcttcgtcgtcaagttggtgatcagcccagttgaagaagacagtcacccactggtttcttccagcgggatagtgtttttctcgaatgtttcgtccatctggatagttgaacattccttggagcttggtgcgcttctttgcttcctttgtgactggagaggagtcaacagacgagattggtgtttccatggtggaaatgtctgagatagagaagaagatattggtaagatagaacaggaagaaagaagtgagtcgagaatgagacagggtgagtttaatatctacatactatattgaatggaacgaaaagaacaaagaccattgatggtttttaatagtacaattcattgtgattgagctgtagagcgattaataggagcctttgatgatcgcggaagttaaccccaatagtgcactacaataaagctttgtcctttgaggactgaaaacacattgtttagctgagctcacattatgatgaaagcacatcgacaacaagctacttcattaggagtatataaacgtccgcaagacaaaattctcctccccaaacaggatatcaaaaccaaacccaagcccctgatccagcccagcaggacgctgtgtacacaacctgcgataggagtgaacaaagacagtctagtgactacatcccattccaaaaaatataacttggaaactgacctcctcatattgtttattatttaggacagacatatcgtctgaaatctaccacagggctaccacgacccagccctcctttaaaactgtgataaccaaaagcaatgggaaaagatggagggtggttcgaaaacagacgagacacaagcggtagacgtagagcccctttctcaggacaaagagacacccggtttgtcactgacctgagaagggacgaaattaaaaagctaacagagatcctgcacatagacaacacaagagcgagacacactggtgagatcgtcaggcgtatgatacgcgagttgccgaaggatatgcgccgtgatcgctggtcaagaacgaacaagcatctgtgcgatgcccaccagggtctgaatgcaaatcttatggccgatgtgttcaatcttgttcagagggaggtcggtcaccacctccgcaagtttgacgcgtacccggacctgctgaagcccctcgatgtattgatcctgcagaagctgcaggctatacggggcatgtgggagaaacctgacccgaaaaacaaggctgtctcacaagcatggcactatgagatcagctgctgtcaggggtgtatggtggctcggattgcgagtgacaagcatgcgctgcgcaatcttcgaatcgctttgctctctcgcacgcagacccgtctgaaccatgccccacgaagacttatgaaatttgtcgatacctgcattgacctattccctgatgacgttgatgagctgtatggcacatctagccagtttgcattcatcttgaaagatacccgcaaggcctgcagcaaggcctgggccaatgacccagcacatgcggattcgaggaccccacagcgaaggcacaccgaccatgacaagatcgacaagggtgacagaaacgaaaagatcggaaaggatgcacatagccatcaaccagctagtgagtatgatccgaggaagaagtatccccagccaccaccaccaatcacattatcacaccctacggaaaggtatgtccccgaatcatcccggtcaacttaatgtactgacactgacactggagggcgcagaatatatcgcctgacgtcgggccattccagatagccgtaagatcatcgtaccatacggagctagatcgacgctcagacccgaacccggaacgcatcactagatttttggatttcgccgatgacaattaccaaggcttaggaataagcacggaaaggcaaagtgcgagcactttttatggacaccctggaaaccccccgtcaccgagcaccgcaagcacactcttgggaaccatggaagaaatcgacaaacttcttgagatgtacaagggtatgggagcaaacccctactcgcacagcacgcaatattgttcattgcatgggggtagcggtgcctcatcacagtgtcgttccccgtcgatctattccactggcagtgaatggagtgacgaagacgaagactggaggatgccagaaagtggcccagcagcgaggaccacttggaatttgttgtgtgaacagtcgaatatgatctgatcgcttctttttgtcttcgcatctcgcatgggcgctttgttcctcgtgctcttgtgccccgtcatttccttttgatgccatttggtttttctttttgattgtatgtcaaatctggtccgagtcaggtgttctgagaatatgatatttgcaaatgtatccgagttaacgaatacccaaaggaaagaagtaaatggcaaataataaacattattgacagtaggtcatagagcaaaccatgtacaaagcattgacaggcgcattctgaagtattaatacattgggccattgatcccatatacaaaaaataacggaaagccccacagtctggcggagtccgccagcagctccagggacggggttagggggtgcgtagaaaaatcaacacgttctcgggcttcatttcatcatggcttcagttgtggagaacacttccaggaaccccgtgactcgggcccttgagactatcaacagtctttcggcgcagccgagtgcgggccgcaggtccctcagttgataccaccacccgctcacgctcacgttcacgttctccggtcaaagtcacagctggggtgttattaagcgcctgggcagcatccagatccacctgcttctgagcgttctcccgagctcgctcgtagcgcagcttgacctcaccagtccaccgagtgccaagaaggcggtcccagaagatgaagaacggctgggagaagttggtcttgataccccagctttggtgatgaatgtcgtggtaggcggcgttgttggaggtaaaatgctgcagtggatcccacgggaaggcgtagccacagtgatcgtcgacagtcttgatagtcgacattgtaaaaaaccacatggcctggcgggtggtcatgccagagaccaagaacccaataccagtgccagctgtgtccaggaggaatccctcaaccggatggttgtagagggcgccgaaagcataagggacgtaaagacggtgatggcgggagtggaaagtcactaacagctggttagtatggaatcatcattcaactttgaaacgtcagacataccatagagccaccggttcagatgcatagcgcggtggaggaagtactgccaggtatccacaatggaaatcgctagcatgaactggagggtcggtataaagtaccaatatatgaaactggcaactgcaagttcccagctcgtgaacgcgggcgccacagcctcggctccgttgtcgaggattatggactgggtcacatcggggtatgatccaccagccagagctccggccaacatagtataaccgctttgggacacggattttccaagactgatagcgtcaactccaacaagagctaacaatgacgggaaggccttttgtgcgatccgcaatcgctgcgcccacacggcgacatcatattcctctctgccaacagtttcctcggcatcaaagtataggaacgcaagaccggccacggtctgaataacctgttgtaagacaacatcccgcacaacttcccagcgagtcactttgtttcgtttcagaacttctgcgggggtgtggaggcggtattcgacgaagtaatcattaacatcgaggtaatgatagatcatagacaggacccagtatgcgatgacgggcaatacaagcgaaaggatgttgtcaggaagaaaagcaagcagatgtccttgtggtgtcaaagtgtaggttggtaggggaggaaggtcaaacgcgacggatgcgttcatagccatgacgaaaggatggcgatgtgttgaagtgtagcacaaatatccaagagtgccgatcaaaaggatctcggaatcaatatcttggatattgaaatggccccaaggtcagaaatcaaacgaagagtgaacgtctgcaactgcccaccacgtcgaagtccggatgctgacgggtaggcgcgacgcaagaatgatttccgatcagtcagagacctctcggagctggcggttacatacaaaaggaagtatgtaaaaagacgaagagaatcagataatgataatgaaggaaagaataggaacggccgaagaagataaaagataaacgttcagatcaggagacgcccggattcgggtggcgcgagccggagccaagacaaaccagtacgatacacgtattattggtatctttatagatcgactgatagaaagaggcaaaatacagtatggtatggtatggcatagacttatgctgactcagctttatacttcgacctggacagccctgaacgaaagtaaattggttgctacagtgaaaaagaatctcaattgatttaaattgaatgtttcggacggcttttatcgttgaattggccataccccttaatttgccggtatttatataagccattgttgccccaagaatgacattgtgcctgggaagtaccttgaagtacccaatactgcgctaacacggagccagtggcggtggcccagactctccgataccgatttggtacaaaccgaacaaacacaaagtcccccgctctattttttttttttttaaagaaaaacctcgtccccccaccttgaaattgtttttcttccttcccgtgctacccttacttttttactctcttcgtcttcttaacgtataattccgccaaaatgcttatctacactgtatgtttgtcaatatcaaatccttagatttgtccctcttcctgtgtacgctctcagaatctcaactgacacccaccaggacatcgtttccggcgacgagatcgtcgccgataccttcaaccttgtccccaacaaggacttcgatatcctttgggagtgtgactgccgcaagtacctgaagcgtgccaacgaagacttccagctcgagggtgccaacccctccgctgaggacgctgatgaggaaggtggcgagggtgaggccactatggtccacgatatcgaggaccagttccgtctggtctggcttaaggctgaggatggcgcgaagccctccaaggaaagctacaagactcacttgaagcgtatgctcgtcttttgctcctcacttgattatccgcgcatccactgacttctgttctttaatatagcctacctcaagaagctccacaagaatgccgcgcccaagtttgctgaggccgagaaccccaaggcagctgaggacgcatggaaggccaaggccgctggagctatgaagaagatccttgccaactgggacaactacgacgttctcatgggccagtccatggacggtgatgctatgtaagctcacgtatcttcccaattttttttgaatattcgactaatggtttctaggcacgtcctgattgacttccgcgaggatggtgttaccccctacgctaccgtctgggctgacggtctcaaggagatcaaggtctaagcaactcttgtcatcccaaagaaggcgatagttaaaacatacgcaccctacacgaacaaatacgtcttgttggaagaattgcgagttacagttcagacgcagcggctacttattccccttccctgggcctgtctgttctaataaccctctcgcattttgtatccccgagttagtgatccactgggtccccaagagttacgcttcatgaaatcatctgtcatgtcttactatttttggcttgtactatgtaatctgtcttctgtcattggtccagtccttgacagtaactcccttgacttgagaaaagaatgagtattgagaccacccgaaaaaacagtttcttacgataaaataagtaaagcgataccaataattacagggatactagttatagtgagttatatttgcagatcatttgattattcatcactcataataagcatactaaggatatcccggccaaccaccctcatttttcccattccagggcggaaaccccccttctggagggcagcctggaagtggaaggccattggcatctaaatcaggcatgttgatggggctagtaccatgaaatgttgaggtagttaaatcaagacccgaaacggggtccagttccatcaggtcatctgcgacaggaagatgttgtccgaacacagcatcccactggtcccaatcgaagttgaggtttgggtcaaccatcgatggaggcgtaggaattctaggtattccattaggacacgcaggatccacgaaggacatgccaccaccagcagtaatgtcagcatctgaaggctgaatgtgtggggcgggaggggtggatgcagaacattgtgtcggtggtggtgcaccaaacaaggagtccgtattgggcgaggaggtgccaatgcggggaggtatgggattatcggcggggggagggttgaattgggattgtgaaattggggataaggcttcaccctgtggttcgtattggtatcgtagaagggttttagtagcatccgggttaacaggatccgaggtgtgagagcgggtgaggttgtagaatgttttgacgaaatcgctaggtttggatttgtgtgttgagggatggccggccgatgctgaacccggagactcggcctgagagtgatctgagctaggagagtgacaatccccgcgagtgtcaactggcgaagcgaccccagcctggatctggtcttgttcggtccagagcattcgcggattgaggcctgccttttgccaagccttctgacgaaggcggcggatcatatcccaggcttcacggccaccgtccttcagtggccgttgtgttgaaacaccgtcttcaccacctacgacacctccatccggaccagaaagtgcgagtatgctgtcgatgaacgcgcgggacttaggtgcttcagggctgtaaggtcgctcatataggtcaataagcatgatcctgtatcttattagcgtgatcaccaacacctaataatggagtcatacatagtagcatgcattggttgatgattactaaaaatgaatatcagttgcccatgattcctggccaccatactagcggaaaaacttacccaggccagctccaatgaaagggctggaaatcaggatccgttgcgagttggatgaatttttccatgaaaccatggcaatgacgaagtgcactatcagtattagcacatatactcatttcccgatggtgtgtgcaaacctttggcgtgccgctggccaaatccggctgcgagcgttcttcaggaaaggctgataggctacgcagaaggcctagaggaaggttagttgaatacgaaaccagcaaagagtgagaaagcgcaccttgtcaatatataaagaaagaatgatcttcgcccatttatggaagcaaataagaaccggtgaatgatattgttcagagcatccggtgggaccttcgcctggaagctctgtgtcggaagaggggccatcgggggatttggatatagaaaacgctcgacctggcgttgacaggttatcaacatccttcccctctggaatcctgttgatgatggaattcagtctcagctgcaagtcaaggagtattgaccggagctcctccatgtcctgcctggtgaggggctttattccaagctggattttcaatattcggcggatagcgcctggtaaagattagtgggtgggttttcaggggtttgaaacgaaaaagggtacacacgagccatggtatatttccctctggcggtcagatagtagacgttgaccattgatggtccgccgcaaatagtggggtcatctggattatcaggcagccgctctcgcgaagcaacctgtttcatataggactctgcagcggggctacctagcatcgtatctttcatctcactagtctcgcacacatcccaataattctcgtcgttgacaagtggaggcagaccgcttgacatcgcaacgacacagtccatgtggatgatgtgccaccataaacggcgccggtactcagcttcgcatggctctatgccaaacttagcgggatcccgatgcaagcccatggtttgcgcaaccctcatcgcaagactaacaaagagactagtcgtcaaaggctcctcctccttcgtgacaattgtctgtacgagaagataagcagcaaggccttgaagtgaagggctgcgcgggaatttgatcttcgtgagccatttagtaacttcttcagtatagattgtcgaaagggccgaccgcgaggacacattaaattcagcttcaattgctcggatcgaaatagtcactgagccgccataccatatcgcgtataacagtgggatgaatgacggatttgggcacgactctcccgaatagctgctgtagtcgtaccaatcccagaaagaattgtagagcttgaggatagttggggggtgaatgataggactgatagcgtgtacaccggaaataaatcccttgtaaagaatatggctttgccgtctcgttggcatgtgatcaagcatttctggctccaccaccttttcattgatcgagggggagtcacctgaagggaagattatagattgttggaaggaacgagacctaggcgccatcgaaggtgccgagctgcctattgattctctccatgactgttggccatcggcatgcgaatctgttatgtcttcattatttttttcaggggtagactgatcatgtgagctattttggtctctcagtaattgattgagctcattgatctagatgcgagttagtcaaactgtctgccagttggagagtcgagtgagcagcatacttcgccagagatataagcccaatacgtggtgccaacatatctatttatttagggttagaaaaaaagatttgtattctcaaatgaagcaattttgaccaaccttgaccttccaccgtcctctaggctcaaatggcctaagttcaaactgccaaccgggtctaccagatcggtggcctgaccggatggaattggaaattcatcgctgctcgattctgcagcaatgcgacgtggactggtagatcttggcggtgttttatttccgtccagactattgctcggccgtgagtcatccaactgtgtgggttccacggccgttgcctgtatctctacatcctcgagtgtttgaccgttccttccgaggcgctcaatcattgacataagcttatcgagtcgtgattcaatggcgcttgggtcgggcttttcgcctgtcgactctgcccgcttcaagtgtccgtaaagtgattggagctcgtcgacatcttcctccaatgtccggggcatctctcttcttcgtttaatgccgtgtatattttggggagacccatcgcgcctatcgtcatctttttgggatgacacatcatatatacactcggtgttgttcttcacacaatttccacatatggggtgtatctagaagagatatgttagcctgaaacaggggcttgagtgttgatggcaggcatatcaatctaccttgtcgcatttgaccttccgacgccgacacgtgtgacagctgtagctcgcgcgatttcgggtgatctggcggcctccagccaaaggtcccctcaatgatgacggagcagacgagttgccagggatggaaggacccgatacgggctgagcattgggtgggctctggttcatagtccctggcaagacatgaaaatagatcaaattgttagcatgaaaacgagacgcgcaaaaaaagaaaaaacggcgcttcgccgactgcgggggttccctgacgttatcggagaccgaagcccaatgatatcactccatgccgaggtcagcattgatgcctgaatttgcgggcaagaatatgatttgttgccttgctgtcactagtactagggcttttttttttttttttgccaaatatgccagtaaatttgtctagtttttgatgtataatcttccatctgtgcgcaggagaagcctttagactactaacacgtttatggcaagatatcggggcaagatcttttcgatgcctttcctgcgctgttcaatgctgtgtgtgggtttgtcaagaaagctcagaccaaaagaagagacaaatattcaataaaatcgtattacatgtccagctttacctaggaactattatgacaggaactaaaactgtatgtctaagccactgtcagaagtcggacagggattctagtgtgcaatctgtgatgatctatagattgaaaggaatctttacaagacatgaatgattcaaaagcagatgttccatagagatctgcatagcgccattttatttcgggctgtctgcagtgttctctcgtagttctacctgaaacccgacggtatactgcagtattgggctccttgtttctcaccacacacgctaatgcaagagcgcctcagatgatgtctcgtagccaaccaatccaaaaacctgaacgctagccagctgtacattcccccctccccccctcccaaaagaaaaaagcaccaagtggcctagaacttgggattcgctgtaaaaagaataacaagcctaacatttaaatcctgacgatttcccacgtattttcctagacaatattgcatcgaaagctaaataatattcacaatgagttttggagtgagcatcggggacttcatttcggttcttactttggctaataagctccgaagagactttgttggcgctccgagccagttcaacagtatctccagagagtgcgtcgatattgtacacctaggttgtcggccagtaactgataattttggtcttacagggtcagggggctggcaattattctccaggatgtcgatgttcaactactgggccatgataccaatgatcaacaacaaaaccaactagggcaaatcagtcacagctgtgtgatcctgctgaacgagcttcaaaatgctctggagaaatataaactcgttgaatacagtggcacatcaattcacaaaaaagctagaggtatttggaagaggattgtctgggagccggaggacataagtgagctccgaggtcgcctaatgtctaatgtgatattgctccagtcatttttgagtgctatatcaaggtatcatatatacttctccccttctgccccacctgccgcacctaagcatgaccaacatctgaaatccatagtcaaacgatggctgcgacaaagcaaacactggaacagctcaactaccgacaagaaggcaatgaaaagtcttgcattctcgactggctgtctgccgtggattacacgttacagcagagtgatcttctcggtcgacgacaagggggaactgggaaatggcttctcgattcgcaagaatataaacattggcttcgaacacgccgaggcaccttgttttgtcccggaatgccgggtgcgggaaagaccatctgttctgctatccttgtggatgatttgactacacgctttgaggaccggcccgatgtcggtatagcctacatttattgcaactttaaccgacgagatgaacaaaaagccgaagacttgctttcaaacctgttgaaacagttgagccagcagaggacaccccttccggatgctgtgaaagacctctacaagcgctgcaagactacatcgactcatcctcgattcgatgcaatatcgaacgctcttcactccgttgtctccacgtattccgatgtgttcatcgtcatcgatgccctcgacgagtgcgaaaaaatttgccgtacgaagattttggacgagcttacaaaatttcgtgccggggccggagcaaatgtcttcgccacgtcaaggcctacggatatcgatgatttgttcaaggggggtggcgttctggagatccaggcacaagaagacgacgttagacggtaccttgctgggaatatgttccgactcccggggtttgtaagccgaaatactgcattgcaagacgagattatgactgtaatctcaggccatgtacagggaatgtgagtctactttataaaattgattctccgcccaagacttagattgctcatctatcctcaggtttctccttgcacagctttattttgaatcattgatcggcagaaggtccgctaagtctactcgaaccgctctgaaggagctttcggatgggtctcatgactttgcgtacgacaaggcttatgacaacgcgatgggccgcattcaagggcaactgggagagcaaactgacttagcgatgcaaactctatcttggctcacatgtgcgagaaggcccctcacttcattggaactccagcatgcacttgcaatagaagaaggagaatctagtcttgatgaggagaacattccggagattgaagacatccttactgtgtgcgctggtcttgttaccgttgaaaatgaaagcgggataattcgactggtccattacacgacgcaagaatacctccagcggaagaaatatatgctcttccccaacgccgaaaacaatatcagcacgttgtgtgtcacttacatctcattgaacacatttggatctggagtttgtgaaagcgatgcagcgatggaagagcgcttacaatcatatccgttctactcttatgcggtacgccattggggcgaccacgtgagagcgaccaaagatctggatcccgatgtgataggtttcttggaagatcagccaaaagttgatgcttcagaacaagcactcacagtgactgaggatccaatccagaaagattggagccaaaaatattcaagaaccatgactgggctgcacctcgccgcacattttgggattcaaggagcagtagcctactttcttgaacatggttgccctgtggacatctgttataacggcggttggtcagccttgaaacgagccatttcaggagatcatttgagcgtcgcccagttccttctttctcatggagcagatccaaacgaatccggtccggacaacttgaccccgcttttacttgctacccagtatggtcaagaagccattgtcagacttcttcttgaatggggtgccgacgtgaactccccgtgtagatggtatggaagtgcactggtcgcagcatgtgacgagggccaactgaaaattgcagagatattcctcaacagcaaggcagatatcgatgtggatagcgagctgtacgggagtcctttagaagctgccgcttcggcgggccactggggactagtgaatttcctgcttgaaaggggcgctgagcctaattccaagggttctgatgttgacaccgctttgcaatcagcagcaatccagggccgaggagatattgtgcagatattgctcaaccatcaggcagatgtcaatcgacaagcagggccgcatggaaacgcactgatagcggcttcaatgaacgggaatcagcaaatagtgcaaatgctcctcgacagcggtgccagcataaacacggaacatgagcttggcacagccctgattgctgctgtcgcaaaagggcaatgtcacatagcaaagatgttactcgacaacggtgctgacgttaatggtcgcggcagactacatggcactgccttgcatgcagccgccgcgttcggaaatagtgaaatagtgcaaatgcttcttgatagaggcgctgacagcaccattcgtgcgggtgtttacaaaacaccccttcgagcagccatgacgagaggtcatcatgaggccgccacgcttctcaaaagacaggggcagcagttgagggtctgaactttgagtatgcatttgcatggaatacattatagatggatttaaggtatagcagaattcacggtacttggtgttatttttctcttgtttgttgttcggtagtggtgattctcctcctctgatggcaaagcaaagtgtgtggatagtcaagggccgactgaactttacattctgcgatctcctgagaggacccgatgccactcacttgtcagagaccctgaggttgtctctgatacagcaacccctattttttccactataaatggagcactagtattatctgatcgctaactatataactcgaggcaatgaaaagttcacgatcccgtctccaggttatgaaaaaagagaagtcaagcattcactatgacatcattttataagcaaaacctccaatataagttagccactcattgtttatttcacgcccttcgttcaagtgtcaacatggtacctcggcgccacatagccagtactactggtgtcaatccacagctaatatgtcttctatgtggaatgaaactcccatacacgggtaattctaggattgcaaatacaggcgaacgtgatcaaatactcaaacagcaatagaaaaagatttggagagcataacatgtgatggtaccatctcgcgaggtagagaagtcagacttcggcaattttcccacggatatggtcatgcttgtgtcgagtcagtaaggtctcaagggacttccaatcaaatcttcccagattctctaactaggacagtaatcaaggagtctgataccaaataccgtcttacgggcattaatatactcaaccattctgcagaaagcccttactacaccccaaatgatccagaaatggcaagaatcggtggaaggaaaggtacagccccggatcaagtcggcaatgaagatttcactgaattctatggtacaagcatcggaaggcagcccagtcaatacaaagggaaagtggttggatatatcatccatgccagttgctgggtgctcttcaaccaagtcgaagggctcaaactgaaggaggctaaactcgcgaaactcgtccaagtctgtcggaaacattggcgcaagaacacaatgtggaggttatatgacaaaaacgtgcgttttgtacaaccgctccaggacctattgcagtatgaatacggctgcgatatctatcaaaatccactagtgcccaaatttcaacaagccttggattgcgcagatgtcgaaagcctacggcaatcaaaaggtcgaatatcttcccggtccagcaacattccattggaagttgccattctggtcgccgagtgggtctgtcctattaagcataccttgagtgatataaaaaacacggggaatatgcttttggtgttcgggtggaatttgcctgattggttttggcaaagacgattggatgaaggattgttcattgaattggataaacttaagaaggtgatgtctccagtcggttggcaattgcggctgaatttgatgtgtcttgttgtgggtagaactgagttcaggtccagtagtggtctagcaagtcgtgaacgggtgttgaagagtattcttgctcttaaaaaaccctacttaaatctagaatcagccaaggagaaagcgctgatcgagaaggggaagaagaatgaaagtcaatgattgctttgcttgctaagttattcctagtcgtcaattaaagatgtccaagtgaacaatttgcccttttccccatcgctcgagggagatagaagtagaaaaaagcaaaggcacatcctatagcaccttaatttacatgtaagacgagggaggtgggtaaaccatgagactgcaaaacttgtgaacaggatatgatacaagattatgaccgctatgaccaacacgtaatcactcataaaatacaataaatcgaaagcacacatcacaccagactagccacgcttgacctcttgctcaagcttgtccaaagccttggcgtatttgggcttgagtgagtccagtgcgtcggccttgatctggacacgatcgatgttcgaggtacgcgtgatccggccgtccacactggctgcgatctcgttggcaaaccagcggccctcgcggtgagcaaccagggtccacgcagatcctggccggccagcgcgggcagtacgtccaactcggtggacgtatgtagtgatgctggtcgggatatcgtaattgatgacatgagtcaaagattccaggtcaagaccacgagaggcacgatcagtagccacaataaccgagatgcggccttgtcggtaagccgtcaatgtcttgcgagatgcagaggatttgttagatttaatgatagttcccacacgcttggccaatgcgggatgcagaagcgaaatgagacgtgcaagtcgggaggcagactcagatgatttggtgaaaatcagaacagtcttacgtgcgggtgagggaacgagttccatagcatcggattccgagtcagatgagtccgaagaatccgaagaatcagactccgagtccgagtctgacccagaagatgaagtatcgtcatcagatgatctgtcagagctagtatcatcatcggagctgatatcatcatcagaactggtatcatcatctgaactagagctgtcagagtcggatgaatcagacacgcttggagctcggcccccaccaatctcgatgtgagaaagaagaagacgtaacagataaagaggtttgagagatccatcgccaacttgaacaatgtactcagacaaagttgggggtagggcgaagtgagaatctgcatgaatagcagacgggtcatgttcgtctgcagcatcctcggacccgatgataatcatcttggggttagcgagacgcagcgagttgagtttagaaatatctcgggtcattgttgcactcagaatcacctttcgaggaggcttggcgtcaattgaaagcccaagttcagacaaaagcttcccaccaggcccaaaggtctcgggggactctcgactattcagcgagttcatgacaacatcaacccactcttggaagctctcattcaggagacgatctgcttcatcaatcaccagccattcgagatgcttgagggtgaatcctttggtatagcgaatgtggtcaaccagacgacccggggtacagataaggatgtcgacattcggctcggactgctggatgtaacccggaagagacgcatcagagtcaatcgcctcactgacacaatcttccaggctcaagttcatccagtcgtttcctttcaatccgtcacgctgttgctgttggagagccgggttgtaaacctggtccacgcgcatcaagagtttctgttcctctttgatggctacattaccgactgcgcttccgatatgaagtctagatccagaagcacatagttcgcaggattcgcgagcttgtttcaccaactcccgtgtagggactacaatcaatcctcgaagtctggaggcaggtctcggcgacagagcggtaacaagggggagaacataggagagtgtttttccagatccagtcgccgcagagatgcaaagatctcccgggtagttttgctctccttgtagaagaaggggaatgacggtagattgcacagcaaaggcttgtttgtagttctgttgttcgaggattttgagaaggtctggttttattccgagctcggaaaatttctttgtatcctgagctgatttgcgcaacggatttgccagccaagcgggtagagatgaatatgttgggatctgctcgggctcgggcgggttttcaggttgaggtagttgttcaagaccctgtgcgtaaacagcttcgacagtaggtgcctcatctacaacggcttcgggttcaaattttttggctttagcgctggaaacacttttggtgcgctcgaactttgacataatccccgagtgcttgttcttcgatttaggttgttcggcttccggtgcttcaacttcatcttcatttcctgtagtcacagacgcagctgcatccttcaatgtgtcgtccgttccagagcttttccgcttgctctttttcaatttctctgccgtttcgctggtgccgttgcgcgggtttccaacagtcgcttttgtgcggtctgagagagtagtatctttccggggcgtttccggggagttcgatccttgaagcgcatccttgagatgcttgcgcttcttgatactgccatcatctgtgacctctgcgatcggcaagccttcgcgtttcttgtgtttcttcgttggcgtgggagtggttgcaggctgagagccatgggcatctctcttgcgcttgtgagactgagtagatttaggagtcgcatcaaaattattagaggactcgagtcccgaatttttgccggccattctctcgtaattctgccaatgtcggggttgcgctggatacctcgtggggatcaaattccttttctgaatcttttatgccggcagaagacataataatatcaccgccctagctaccgcccttcttatcgggacagcttccagatgtctccagatgtctccaggtctcctgtatttattggctttcatggactggtgttttgagcagcagatctgttagccatggaaaggaatttgaaaagaagagcaaattcgatacctcggagttctcgttctcaccctgagaaccacagccacgatgccgtataacatcgcgtgagtatttgttctatctactagtcgcaatcacttgctaacattgatatggttatagaatggtcagtgacttcttttttccccagtcaggtaagcctcttcttttacgtgtagtttatacaatcgctgacttttctaggtggaattgagagtcacatataccaattgtcatctgtaagcacgctaccttgccgctctacctgcgctctctaattgctcctcagaaactcattgatcgaggacacaaagtcatcgttattacccatgcatacaaaggacgcaccggagtccgctacctcaccaatggactgaagatttaccacgtcccattcttcgtcatctatcgcgaaacgacattcccaacagtcttctccttcttccccatattccgcaatatcgtcatccgagaggagattgacatagttcacggccatgccagtttgagtagcttctgtggagaagctattctccatgcgcgtactatgggactgcggactgtcttcacagaccattctctcttcggatttgctgacgcagcatccatcctcaccaacaaattactcaagtttacattgagtgatgttgatcatgcgatttgcgttagtcatacttggtaagtctcccgccaacgccctggatgactcaactgacaagtttcagcaaggaaaacacagtccttcgggcttcgttggatccattaatggtgtcagtcattccaaacgcggttgtggcggagaatttctgtcctctatctcatactactcgtgcacctgatcagggcctgagctcccccgccgatgctccaatgtccccgagacaaattgggcccgatgatccgattacaatcgtggtcatctcccgacttttttacaataagggcactgatcttctcatcgcatctattccgcggattcttgcctccaatcccaacactcgcttcattatcgcaggatcaggacctaaagcgatcgacctagagcagatgctggaacgcaatgtgcttcaggataaagtcgaacttttaggttcggtccgacacgaggaggtccgagacgtgatggtgcgaggtgatatttatctccatcctagtctgacagaggcattcgggacagtcattgttgaagctgctagttgtggtctttacgtggtctgtacccgtgttggaggcattccagaagttttaccccagcatatgacaacgttcgccaaaccggaggaggatgatattgtgcttgcaaccagcaaggcaattgcggctttgcgttcgaacaaagtgcggacggaccgatttcatgatcaagtgaagatgatgtattcatggcgagacgtagccgcccggactgagcgcgtgtacgagggcattactggcgatattagtccagaagaattctatggttactatccaggtcagggctgggaagcgagcggagatcgcgtccgcagctttgcgctaattgaccggctaaaacgttactacggctgtggcgtttgggcaggcaagctcttctgcctgtgtgtcgtgattgacttcttgatctatgtcttccttgagatgtggtttccccgagccaacattgatatcgcacgaagctggccaaagaagcagccagcgagcaaaactgagagcaccagaagtggtcgctgagaattcgcactccacccaatccttagcgcagaaaggaccggcctgtcaatatctttttggtcgactctcggttctccgcctgtcctgtttgtctcggacagctcataacctcatttaatcacccctcttcacgtcctctcgtgttgcacgacccattttacacattctcatccataatacctcatacataatgtctacttggcaaaataaaatgcctgaaatccttcctgcggtggtgccacctgcctagatggctggtggctgatagttgaccaaacttcacatcgaatagactccattggtatattagcaagaaaatgtaataatcaagaaccaacgccattatgcacctgcgtttgacatcatgtacgagaatgatcggctgccccaactttgaatcaacgcatcaccggaggcctgccctctttattccacttgacgcggctttgtacccactccacagccgcctggacaccagatccaagtagcgcgctgaccggcagcacacgactgtcacggacgccacttcctgtttctccctcaaacaccttccggacaagcccttctttaatgcgaaccacctccacgcagtcctcacggtcctgcttatttgccaacaccaagataggaacaccagccacatccgcattttgtaagactgactcgaggacttggcgacattcgtctaatcgcccgaactcactgctggccgcgttgattccgacattttgctccgagaaggcctcggcacttgcgctccctcgtgtgccattgcgtgtaggacctgccacggagcttgcgcgccgagtaagtcgcgcgatatcgggatcttgaccaacgtcggaactatcgaccacgaagatgatcgcgtggcagctagtatagtagctctgccacagaccgcgcatagagatctgacctccaacatcccaaatctttaaattcatgtccggtaacgctatcgttgcgacattctgcccgacagtcgggacggtttttccggggttgggtactggggcgccatcggagcggggttggtacagtgctttgatctgggagaggagtgttgttttgccggcattatccagtccaagcagaatgacagaatactctaagtaggttaggataatcagcgtagaaggtcatgcgataggagagagcagttaccttctttgctcgtggcggctaagtacagcgacttggccaggtgatacatgatcgcgttccctatggggagctcaaggccaagcgcaattgcaattatagaaaaacgggaccggaaacagaaatcatgacatcgcagtcagttttctgacgttgaagcgctcttcccccggaggggcccgcgttgcagcctcatccatttcggggagttagggcttagggctgaatgtgatctggggatgttccagtccgaactacatcgggcatttcaatgtacctcacagcggtaaaacagcgtgcattcaacactttcaacatttccaacgttcaaatatgttcaattccataacttcaagaaatatgacgctataatgatggacgccacacttccccggcatactcctcgggtccaggttcccaactcagtctgtcttccaaggtggcaaatggaaaaccgtcgactttcccgagtctcctcttctccccacttgcaaacactccgctttccagggtttgtcagcttttaattgatcggcggacctgacgataggaagccaatttgtcagggacgttgacctttccctcctgaattccctgggatacaaatgtcacattcctctatggccttgctgtcgatccctggtgagaaggcagtgtgacgaggatctcaccctgctttgattggatgatctaccctttttttttaccctatcgcatgtctataccagtatgccacacgctccatcattttcttgatatacatcgctgtcaatggagattgacactatcatcgtcggtatgtctatcgtagttgatgaatcattttgaggccattcgagacttttcctctgcttgagccccacaccccaccccgcgctgctaggagtccttgcgaaatggtaactgattgaaccgattttaccaggcaatgggccgtcggccatgatcctttcatacatcctccatggacatatccctttctactcatccgatcctccacatcccgatcatttgttggacgccaagttgaaagctgcgccagatattttgaatgccgatgtgaatgctcttacagcacattttggcgcctcgcgcctatcgtactcgacccaggcgcttcccgtgaatgttttgctagacacacttgtacggccaagtgttgatgtagatgagcccggctgcatctcaaatattgattggcgctcacagcctgagaaggctgtctcacatcttgtttttggaaagtccttgaagcctggaggccaatggaccgaagatccatcgggcgcgagttgggatatccagacgttgagttatgcggcaatgctgtccttgcccgggtactcctttgccgcccatcacaaaaagaccacaggcaaagatttaccatcatatacaaggcccacgcgccgcgagattgcggattattttgccgcttatccggaggctgcgcatatcgatgatgcttttcggtgtggcgaagaattgaaaggcatttcccgcaccgctactggattttatgttcattctcataacatccactgcaagcgtctggtcctggcaagtgggatcttttccgaaatcctctcaccagagccggtcttacgtccattacttgagaccaagtcctcgcctaatgtcccgctagtcgttgttggatctggcttctccgctgcggattctatcatctccgcctcccctgaccaaaagattctgcacatatacaaatggtcgcccaatgaccgcccatctcctctccgggcctgccatcagcaagcatatccagagtatgctggtgtttaccgtcttatgaaacgagctgccctcacagccgaagctgctggtaaaggccagcggccaaagtaccgacgcgcgacttcaacgccattccttgaaagccggaattgggaagacctctatgaaggtctccctaatgttgaagtgacgaacgtgaaagtccacggcgacctggcgacggtcacattccgccagcaagatggaactgtcttctctcggaccgtggccggcctcgtgtatgctgcaggccggcggggcacgctagattaccttgaccccgagctccgctgtgaagtgttagggcagggcaatcaaaagaatccagtagtcaccggtcagaccctccgtgcgaaagcaatcgaggacctcgaggtcgcaccgggagtttacatcatcggcagcctgactggagattctctggtcagattctcatacggcgggtgcgtgtacaccgctgggcatttgatagacggcgagcgggacagtcgcagtgtctgtagtagtctcacgctatctgctaaactacatggttcttcgctttccgtgatgaacggcatggacggacaccatgtctacccgaatgacaacacattggacctggctcgcgaagataccttcagcaaaatgtcaaccgtcacgaaccagtctgttgtacgtggttggtggaagacactctcccgcatgtggagtcatctcacacgatgaggatttcgaaatacgttgcatgtacaccacgatccccaaatgtaaaattctagacacgccaagaaaggcatatatattgtttatctatcttgtttctaaaggattttgttccctgcgtgctcctccaaactacaatgaaacctacaaaatcccaaatccaagatgcagtagaacatcaaatgaaactaccgaagtgatattgacattcctggttagacaagagaggtaagcagtactagcgatcacctaaatttcggtccatcctccttgatcatatcagccgctttctccgcaatagcatacacagtagaaatgatgttcccactgatctgcgacggaaaaacgctcgcatcgaccacccgcagtccttccaccgattttcacccgcagtctattatcaaccacaggacccattgcgcacgtccccaaaatatgattgaagggcataatccgctcacgggcaaactgctgagcctcagcagggacctgcaagttcacagccggcggcggatcaacacgtcccagcacactgccagccacatccttggacgagaacaccttgtccacgaaagccaagccagctgccaagacatcaacatcggcctggtgcgtgagtatgcctagatcgatatcagggggtccttggagggatccccttggtgatatatgcgtactgccgcgcgaagcgggatacatggcactgatcaacatggtgtagcatgcattgcgacctttcggtgctcccggcagcagcaggccttggttagaatggccgctggcgagattgaaatggccgggaatgccgtagtattggatcgttgcgaagtcggcatctcgtaggctggatacgatgtgcttgcgatagctttctcggaatttgtccccctcctctggggcttccacggcggcgactgtggcctcgattgccgtctttgggacttgggatgcgtagggaaggaaccctgtcaggcccatgcagcctgcgaggagtccgttttgggtgtctgccaacagcttggtttgttgctgaagaagattatggtctagaaacaaggaatccatggtcacaatatccggcacgagttcgtatacggcggatgtcatggggtgttcttgtaggttttcccccacggcgggcaggtcgacgattggatcgatgccggcagattgaagaatggctcggtttccaattccagagagctcaaggattcgaggactttggatagtgctcgctgataggatgatctcttggcttgctttgaccttgtgctgctcgcctccgtgccaaaattccactgcgcttgcccttgttgcctcaccaatgtggtcgaaaataatccgactgacagatgcttcggtcaggattttcaagtttggacgttcgagggcagggatcagatacgcagaagcagaatagctgcggcgcacttgcccgccgctgcggtcaatgtttgacaggctttcaaaagcgcctatatgttggccaccgtaaggatcgtcggatcttggaatccctgaagtgttttcgaggcctgtgaaaatagattgctcgaatggaattggcgagggtggcatagagagtcgaataggaccctcttgcccatgagaagctgaagacaggtgtactaaattttttgtactattcagtgggtgttggaggtcttcgtgcttcaggtagtagggctctaagtcgttccatgaccatccggcattctcttcaccccacgaatcgatatcagaggccgatggacgaacgtaggccatgaagttgacggcgcttgagcctccaagcaacttgccacgggggagatgatgaatttcgtccttgttccccgcctggtttggttcaagggatatgtcagctcatgtacttatttcaaattgattaggcttcccgggcatggaagggttatcgtaacaacgccaacatacttgcggtattgtcttgaacttccaatcatactcttcgttatgcaacatggccgatatgccagtcggggagagtacattgttgtcgtccagcttggcttttccagcctcaatcaccccgacaacgacattcggattctcgctcaaccgattggcaaggacaagtccagcagtgccaccgccaataatgagataatcgaattccgtggctaagaattcgctacaagtgggaaatgagtaatcagccttcatgatgagcagcagaatgtatgttgtcgttgaaagtatatacacaatgagatctgcagaggaaatggcaagctatttatgctgatactaagtcagagtcgtgtcgtcatatctacaaggccagagctgtcagattataaaccccgtactccgtactccgtacatgcctcttatactccgtggacgcctgaatgcggaattagtatccgggctgtcagaagtggagcttagggtttcgaccacgacgatggtccggtaacatacaccgccttacagggtcttacagacagtgtatttttgaaacttgtatccgtacctgcagagtcctgcagggtcccgaccgagaaagcttagccaatcatcgtacaagcacgtggttgtcatcagaaatacgaaaacgaaagttaatgatcgggatttgtaagagagtggggatctgacggggtctgacttgttctaagaccatcagataaaaaaaggactccacttccctgcatgtccgacttttctttccgtagacctattaaggacatttgtttcaccgggcaaatttggcataactgctatatccttggttttttatatattctcggggaataaggaggtcgaagcacaaagcacttctatgattccggcttcctgggaggtaccgaggtacaatggactaaatctcaccgcggccatccagttgctattccggccttaaaagtggagaaaattgcttgattggctgattcttggcattatggacagtgacatcgatcttatctcacccctcaacatcagttcgcaccgatctttgcttaattaagtaaaaggacagtccattacggccgaaacctttcattaggtctagttcatagatgattatgccagatgcacagatatctactttcatcctgctaaatccgaacatcgtggccaccgggcaaccttggaaagcatcagcgtttctaattaaattgcctatcctagcttacggcggtgtgacagtctgataaaaatagtagttagttatatagtccgaaaaatgtgtgactaagtaagactaagaaatttactgtggggaacaaagccacatgtaaatgagggtgctttttgcaaaatagacaagttacttggttatccatctaacccaccccaacgaggtacggagttagagccgaatatagattaatcagaccattcggtaaagtcgggacttcagcctatctcgtccttctcaacttatataaagccaggtacaagcccgcattggcatgaatcttaaaaacaagccactgttcaactatccaaccatccaaccacccaaccatccatcatgcgtctcaccgtccttctctacgctgctcttgccggcctgtcgctggccgctccagccgaacccgccgaagccgccgatgctgctgccttggacaagcgtcaggcgagctgcgtgaccatcaggaaccaactcgcttcctgtgaggctgaaggcaactgtggcactgtcatggcccagtgcatcgctcttcactgccaggtgagtttgaatttaaacgttacgaattgtgcccacatggataactaactcgaaaatagcactgcgccaacttctagttggggtcaattcctacttctcttccaaccgaggtcgatgttgataaggtataagcccgtctagaagaggtagtccctcgcattcgctgatgattcgtctggcagctcctgcgggtgtaatgcccttctcggaaagctggacatatagagaaaatgggggataaaggccgaggccgatttaggcttgtctaggtctctgcaaatgtttgatttttggtccatagggctttccgatatcttcattcaaatgcagtgactttttacctccgctaattatacgcgctgtttccaagtatcagaatcaagcttgtagagattcatatatagtttgtcccactgataataaataggagtgcgccattgggatatccctagatcgagaacgatggagtagcctcaagtagaactgtttagctgaatacatgtcgtagtatttgcactgattaactttgcactagggtggtatgtatgaattgttacgtgcgggggtcttcaggaaaaatagtgcattctaactagaatattgaacatgaggggggaaggaaaggaaaagaacagggatcggggccattgtaggcttttgtgcccttgccctgcaactggcttatggatcaggaaggaacgactcccacaggaaaggaaggaaccaacgagccttgatcgaaatatatatcaaccctccgaacctccagttttattgtaatcagcctcgaagcgttcgcaagtctgaacaaatgacgtatcctgctttctccatatgacccaaagccttccaggaagacaacattatttaaggaagtggatttcttgaatcacgactcatggtggcattagtttactcatttttgcggcaagggtagggctttcgatggcccacatatatatatagtgctagtctcaagtaggaaaggcgggtgatgttccgcatggaacccgggaagcttagatatgcttattcgtatttgctgttggtcattgctcctttctcttattggggcattgggtattgtggcttggctctgatttgaaaatgatgttcagcagggcttttttatcaggttagaattactgatctcgtgaaatcaatggaccggagcgtaatccttgtatctgaatcaacaaccagaaccatcttcacgtgataagactagctacacttcctacgatagtagccaatgacaccgagtgtggtacaatctgttggatcatattaagttctcttgttgagacaactgccagcattgcattcacgaaatcaggtagaaatgttctgccagtatcggcacaaatccttagtgattcgcacgaatgtagtctaggatttgctggatcaaaacatcgtcgtccaccaagtgatagatattgccactaggatagccagatagcccccaattgagaacacattcgttctcatcgtcgtacttgaacactctcatcaattttccgatggcgacaaagccgtaaactgggcggcggagccagattggacgtttgccgtgtgtgtcgctcaggtattgagtcaattggttcaccccttcctcccaacccgatggccgggcctgtaggctctgtctcttgcattggacaacaagaaagttggtgggaattgtttcgaaatccatataatgatacgtatggaataagagttcattttcgccatggaagcgggtcacgtagccggcagagcagggaaattggagggcaagaatagagttccaaactccatagattgttgcgtcggggtcgtttcgtttggtacgatcgatctcttcgtagatggcacggttggttaagtgctaatactagttagcagcttgcgagtaaccatgttgataatacttgacttaccgtttctgccatgggaggcaacaacctagcaaacaaccttgtaacaaaggaaagaagcaagcatatgtcagcgatcataaagtcatatgatagacaatcatgcagatggttacaatagtaactaatttgtttgagagaaagcgaggattttcgattagagggatattcgccggcttgttaataaaatccctagcctattgtgtcgtctcatttagactcccgaggccagtcgtcatagacatgctacctaatcaccaccgaaaagaccatagagacttaacataattagcgcctacatcgcctttcatgccttactcattgagactccgcccgtcttttgcccgccgttagacgcgggcctaaactaggccgctacactcattttactctccttgttcttcttgtttcccagctgcttgctatctagagtcctttcgcatttactggtcgatgccaatcgccctctcgtggataattgcttcttcctcttttccgtcatcgccaatgtcggcccccgtggcgccagtcactccctagccgtagcttaccgccaggacagcgacagcgacatctcaccgtgacctctagcacgcggagagcatgtcgtggcagatactctcgcgctgatcgaaatctcctcggacctcgcgaactgcgcaccgcttgggcggagacggggctctcggagggctggtatcgtcggtctcagcgggcaacgaggtagagagtagtgagcggccaagcttcccaattgactaaattttgcgcagcccttaattattagagcccggagattatcccccgtgctctaatccttgacatggacctcatatcaataccacttactgcacctccctcgtgggggtataaaacagtcaaggttcgagagcctatcatccgcaccgtgtggcgatagttatgatgtgaaccgcagtctttctgtaagtgttgtttagatcaatgctcgctctgcgcgacacctaatgcatgaagtgcatcccgaagttatgaagccacttgaaaattcctcattgtggggcaccggcctccatcaacagcgaattattgccgatggtcttttcgtcaaggtgaagttcggcgggatcctgtataagtataagcagattatcgatgttgtccatgtgcgcagttcgtggtgcctgtgtgacggggtcaagcgcgaggctgttgtggtcgaggcatcgggtggtaagtggtaagcatccaatttgtgcagatttgtgaacaaacccaaaccctctggtcaagtcaattgttccgagcctcgatgttcaatcatgttttggcaccgtccatttgcttagcccatcggtctgtaaaagagtgatcgctgcatgttattacctttagagaacccctattagtcaagcgggatcaactcggcgcctccaaacatactcgtatcatctgtcctggggcgaatagggtttctgagtgcataattggtctgagatagtgcgttcgtatactttttcctagctcggagctccatttgtggagaaaaacgtatgttcaacacggccgctaatcccactgcggccagcgcggtgatcaagggggaattccgagtgttcatccaaggcagcggatagggcatggggccccgtagggatcaccggacatggagttcacgaagatatgaccctttgctaatttctggactgggtaaaccagactgtttattggcggggtgacgttttgagcgttgttagtggggggtgctagtgttgctagtggcgactatgcgcgttttgcgtggctgctgaaacttgtttgatcctgcaaaaattagtacaatggcattatggatctcgataccctggacaatccacttgagcccgcatacattggatacgatggtgatccttcatcgcactggtggggcaatttagtgaatggtttcttttctggcgtgggcattcattctttcaagcgacgttgcgacagcgggatagttggctttccacattaagccatctatttaactagtggtgatcttgattgcgtaggtgctaaaagaagaagtcgatacgttcacacgttgagattgagatgaaacagaaaaccaatgttgagcacctcgtcaggatccaggctgtcagagcttattattatcctccaatagaaaccacaataatacgccaaccgtttaagccttggagaaaggtaaaggctcgaatatgaggactagtcaccccttatccaatgcgatcagcagctaaccctatttcctattagggctgcatatacaatccctgtctctatatgctaggccaactactatatacttcaaattaactatgatctacgacgtactgtcccatggcttactttatcctagttatactcaaattaaaaatgaaacggttttctcatttccccccttttccccactgttattagcccactcgtttaatgtgaaatatggccccatacatactaacggaaaccggttggtcccaacggtcttcccccttcagttgccggtcgaaatgccttagacgccatttcgtactcatttcccagtgtagatctctattccgaatgtcttccgacataattactcccgataatcgggtagaggaccgtttcttccttatataacatctctcctcgtcctacgaatctctgatccatactttcctacacctcatttctaactaataatccctcacttcattctattccctgaaacatggctgaatccaccacccttatcttcgttcctggcgcgtggcacggccctgactactacgatcccgttgtggaacgcctggaagcagtcaactacaaaaccgacaaagttcacttgccctccgttggcccatccgagtatctcttgaacttcgatgcggacgttgcgcaaattcgctcccggatcgaacgagcagtggatgccggccaaaaggtcgtcttgattgttcactcttacggtggcttgcccggaagcgaggcaatcaaaggcctagacatcaagacacgcgagaagaacggtcttcccggaggtgtcacgcatctcttctactgttcctctttcatcatcaaggaaggagattcgctgattggtgcctttggtggaagtgacctcccgtggtttgttgtcagcgacgacaagttgcaagtcaatcctgccgatcccgtgggaacattctacaacgaccttactcccgcccagattgagacttgtcttgccgacatcaagcctcacagttatcagaccatgcacagcccttgcacctatgccgcgtggagagatgtgccaagtacttacatgtactgtcttcaggatgctgctattcccattgagattcaaaagggaatggtcgaaggaacagcaggtggatatgacattaagacagagacagtggacgcatctcacagcccattcctcagcaagcctgatgaagttactgcggcgattcgtcgggctgctggggaggttgtttgattttttggatgagtttacaatgtgttgtgattcaatgttttgatatgagtgaatagcattagatatcagtgatgaatttacttggatgatcgaattaacataagaatatttggtatatacatgaatatcgtggaactaccccgtaaaatatataaggatgcccattaaaatcatatacctcacactatctaaaaaaatagatagctgaataattgatggatgttcttcttgagctccaaagttgtaccccgggcagcaattcggtggcaagtgaatcatggttacatcaccagccctaagaggtctatatagtccggggtgatttgcttatcaacttattattatagtgatttaattcttttttagcctaatattaagaacgtagagaggcggaatataaaaattccaaggtggcattgactagagctatccttctcatctcgactttctttccaactatcaaaagatgtggccagccgatgacccaatctcagcctatggctttacagccgttttatcatcggctactactcttctcgcaacagatcctccagtaacaccagccccatcgattgcagtgaccgaagtcccgattccagcaacgtccctcgcccagcgaatcaatgaatatgcaaaatctcatcttcctgagccgacatacaaccattcacttcgcgtttatcactttgggcttgcgattaagcggtacagattccccaaatggacatttaccgatgaaacatatttccttgcctgcctgcttcacgatatcggaacaaccggacctaacttagaggccactaaattgagctttgagaccttcggaggcctgaaagcactggaagttctgcagaacctacagccttcctttgtaggaagcccggtcgcagtcgccccgaaagatcaagcagagagcgtggtggaagcaatcatccggcatcaagacttgtgcgagaaaggtaaaatcacagctctcggtcaactacttcagctggcaacaatcttcggtatgttgaccctctatcagagttgattgttttggcataacatattattccttgaacagcgaccaaaatggcgtagcgctatttactggccccaacaagtgtacaaatgttggctctaacttgctggaaaacagacaacactggctcttatgccaatctcattcatccctcgactatccgagatgtttccacccatttccctcgtctgaaatggagtgggtgcttcgctagtaccgttcatgaagagaatcggcttaagccctgggcacacacaactacacttggcgaagacgaattccccagtaaggtgctaggaaatactctgatggcaccctatgaatgatggcatctcgaggatttccaaagaatatctggcatggagctcataaaccttttagacgctaacaataaaagttgacaaccgagcttgcattcttccgatgacctatattttcacaaacatatattaggcttcaagaaatataagtatatcttaaattcatacatcaggaatcgtattattgcggagcgaagcggagcaataataaatcacgaggtcttaggtgtatgtcatgtgaccaagatacgtctgaatatcccatcatgtgaccaggtaaatgagctagtgctggctagctcgttctttatgcaccaatcaaaatgcatttattctatcattatggctttcaaaacatgcactagacgcggtcactcgcgtcctttggagctatttcgctcgcgcgctagcaatcgagagaccgatcagtatcaatcttgtcgagatgccaaaaagagagagcgttctaaacgccgtgcggctaccgagcaggcgttggcctattacatcgtccccggatccctacatggccttggaaatttgaatcagtcacttcgctccgcaatgactatctggaagcttaaggccaccgagatcccaggggcttatacattggttattgcgatggacccaaaaatctgccgtaagctggtcactgaatggtctcatttactcctctcactcccagactgccagttcactcctagttcattcccacttcactcccacttctgctcaccccaactcacctcctcagctgactctcaataagcgacactcgcattcaatctcaccacgatcaactatggagtcatctcataggaagggagagtgcaggcgtccaggggtccacaacggagaagagcccagattgttgctggaagcctgcaagtcgcccgcctggaagaggcctaaaatggccaacagtggtcctgaaagcagaatggtctgaaccattgactaaattgaaacaagatgttttattctgcctgaacgagtcaaaccaagaggccaaattctcattgactaagagtcgctcggaggggaggaagactatcaccattgaaaagtggacagctgacagggattctgtcaagcccatccaagccatatgtatcaccccaattcgaggtcccaattcgagcggccatcagatctcagggtcattgaaaattccatttctggactgttttcttcgcgcaaagaggaacgctgagatgcattttactctatcgcacgatacatgctggacattggagaagcattctaaccctacaacatcttccaggaagataaaagatcgtgctgaaattgtcaagatctgtaccagttggatcgataagcgggggatatcatggatgctgatcccactggtggcgggggtcagacttcggtccgtcagacaccaacccaacaaaagcacagatggagaggttacgaaagctctcctaccaggtgtaggggcctcacccctgcctactgctactcacaatttcctcttaccattccttcttcgtctcctgtcccataataataatagtaaacgaggcgtagtccagggagatgaattgatctgcccgcttgcattcatctctaggaactgaaaagcacaataaaatgagcaagttactatacttcaaccccaaagtagcgaaattgtccagtcggtgtagagatagatatctccccgaactcggacaacacaccttcatgaatcctccacagaagccaaacatgcttcgagccatcctcgccacgttattcctcctcgtgccattttattacatatacaaacctccaagtctactcattcgttactgtcaacggcgctggccggatgtacttttccgcgtagacacagacaaaaaagtggttgcgttaacgattgacgatgcgccctccatacacacacctgcaatcctccgtctattggaatcgtacaatgcagctgcgactttcttcgtgataggatctcagatcccaggacacgaatctgtcttggctgacctcgtccgggctggcaacgaactcgccaaccatgccatgtatgatgagccatcgcgtgcactcagcgatgacgtcttggcagatcagatgcggacagtccatgctggaatccaggaagcctatgtcgcggctggaaagacggaacctgagaattggctctttcggcctggctcggggtttttcagctcccggatgcgaacgcttgtaaaggagctgggatatcggctggtgcttggcgatgtgtatccgcatgatccgcaggtgccattttggaaactgaacgcgagccatattttgagtatggttaagccaggcagtattattgtctgccacgatcgcagggagtggacggtgcctatgttacagaaggtgttgccgaagctggaccgcagagggtaccgcgttgtcacagtctctgggttattgaaagagattggcgtaaattgatgttcaagttgatggcgaatgaatattgcgggctatcaatttacatatttcttctcgaaacgctatgggtatattcggacactattctcaacaggctagcccatcatctgcaattgatcctccgggggccagcggacttgcgcaaagctcaagcagcgcttgatactctgtagatatttgcgagtaatctcgtcactcagaatgtgtgcctgctggtcactttgatgcagcttctctcgtgcagatcgctcgtgaataccaaccatggtcacaccgataggccatgctctatacacatgttagtgccggttttaaatttaacagggtgtgggtcaacatacgctttaccgatgctcactcgtaggtaagcatcatttgcatcgacatatcgccgctgctgcgccttgtgaacgatttcaacgatcggctccaacagcccgtcctctagctcagccttctcgaagaggcgaaacaacggtgtcatattctcgcgtgattgagtcatggcattgaacgcttgttttccctggaagctttcccgcacagaaacatcacgcttcgcaagtgccagttcccattctgacaaaaccatgttgaagtaagatcccaactgccggaaaaggaacagacggccgtcttggtctttcgggatcttggccgggatgatcatctgtccaccaggcacaggctccagggtggtagggataggtccatcggtcaccttcttcttgggaatagcggcacgttgaaccagacgacgatatcgtcgaagacgggctctgtagtcctctccaaacaatattattggcgcattcaactctcgtaattttgcaataagctcctcctcctcgatatcttcctcttcgtcgccgtcggctggggtgttctcaggcagctcgggcagaccgagtctccgccgccgttcacgttctttggctgtttcttcttgttctcttctcgtcttggactcctcggctagtcttcgcttcttctcctcgcgttctcggtttcgatccgcttcttcgtcttcgagcttgcgcttgttcgccatgcgctcctcacgttcgcgtgcaagtctctcttgctcttctttgtaggcttgaatgcgggcagcttcgacatcgcctcgtcgcatatatttctttgctggtactggggagctttttgcggtgtctttggcggatggtttggaggaatcactacccttagccttagagatctccttggacatcaacgcggcgaaatccatgttgggtgatgcagcgagctgctgaataattcgactgtagctcagttaaaagaatcgagacaataaagtagagttgcgtcaagagaagaagatggagtgtggaggcaggaaaagaatgttcggctttgcacgtcacccgcagctttcgacgccgcatttgtttcctccagtcaactcccctcaaccaaaatacaccgaacatttaccttcaaggacatttatccaagctttaatctacattcaactgatcggatatctcattatcttctgtttcttgccgtcctcgggactgccctaccatcatcatggctgctccgtcgcgagagggctcaaaaccctcaatcaaccgccagaccaccgcacctttccatttgaagctcttctaccgagtgaataactacaaccccctatccgactacagcatccccgcaccatctcgtcgcggaggaccagtcagcggcccaaactccatccgcccaacatcacccgtcgcatctccagcgccgctcccaccacacctggagatctacacatggcaatcatgcacactccgcgagctctcccagctcctcacttccgccctcccatcattactccccgacccgcctgtcggcacccgtctctgcttccgattgatctaccccgacgcgcgcggcgccgcaatgggcggccccgatgcgcgaggccgatacctgagccgggatttaggcagtgcgatcgttgggccgagggatagtccattgcgcgcagacgacgacgaagataagcaggatgcacgacctcgccctggcccgctccggttccagggctccgaggccgacaggcccctgcaggaggctcgtttcatcgttggagactacattgaatgcgcgattctcgcgccgcttgaggatgggtctgttgcgccggcgcttaatggtgcatctggtccgattatgggacctagagggggtggtggaggtggcatgcgcgcgttccgggataatggctttacgagagggcctggtcgtggtggtcctcgtgggggaggaggtggtggtggtggtggacctccgaatttgcctcgaggtgattggcatcgtggtgagcgattgcctgaaggtggacgtggaggccgtcgtggatgggcgccatattgagaagcgaaagaaagctggctcaaaggcagttttgtgaaaagggcgataaatacccatattatgtatgactatttagtttaagaccaatggaatcagtaccatctactacatgcactaccgttaacagaaacaagaaccatgtgcctcctggctaaagaggcgactagagctttatattgcagtatttcaacaaaataagtgtacttgattaaacttttgaagatttcagcctcttcaatcgtcgtgagtagctaagggtgacaggcattcatcctctagtcatatgacatccaggttagtgacgagtagacgcctatcagaagtccggacactgaacgagtgaaaaccgtctactacgtagaatattccgggtcgtacatctaacctcagaagtaaaccccagtttcacagccatgcaccaaatcaacaaaaaagaaatccatgcggtatatgcttgtaataaagtacacggccccacgacagacaccggcacaaaaagagttgaattcatcgggcaaacaaaacccccttccacactcggagtatccgcaacctctctcactcagtgtgtagttctccatatggcgccatgtcacattcgcagctcggtacggcttcgataacaaaacaggaattgaattatcgctagatgtctaccattcggcgatggaatctcctctgcgcttgccacggaactcgaacttgccctgcgatatcgttagcgcgtgtttctctctccgcaagatcagaccacaatgtgcaattgcaatccaattcaacaatgcgggattccatacatcggtcttgtaggcgaagtatcctaggatgccggggatcaggccggcgtagacgaatgagatccaggcctgacgcggggtccagcgccagtacttgtagcggttgatattgagttctgcgggtccgttagtcaatcttcaattgtagatatatcgtgtcgcggcatgctggttttgagagagatgctccagtagctcgggtatggttaagctagcgtgattcgcgaggctcgtccggggtcctggatcgtaggagatggggttgggggtatgtaccatagtatctctggagggccgggtcaaggatcacggctgggacaattattagcaaatcaggtcgcaggattcgtcaatttctgaaagctcacacttgttatggccagccattgttgcggatagcgttggagcgtagacacagaatcgtcaattgcaagcgtctctaggattgaagttgaaggtcacatgatgatgaatcagctgaatgatgtaatcagctttcgtcctcccagctcgtctatagttacgatgttgtgcatttcgagatgaaaagatgcatattattgtgtctctatacctaattgttcttcccaacctttttgaatgttctcattatcgatttctgtcgtgcagaggtgtggaggatatccgagatgatccgccaaccaaatgtcctccatatgcactgacacagcgtataaacaattaactagttaactatgtaagactcgagacattaatagtttccaaaacccattgcgccctttcataacccgaattacatggaagccgagaatttcccctcgatcgcctcgatcttcttcacagcacgctggtacccctcattgttctcgaggcgcttggcatactggataataagagggtatttatccttgttcttctgctccttcagcgctctcccggtgacagcaatgaccgggaaactcagcaggatatcagcagccgtcaactccttaccgcagatgtactcgccaccctcaggagacgtgcggagctggtcctcaaggaaagcgagattaccatcaatattgcggttgaggaagtgattatccacttgggcggcaaccatgccggtgataggccgaatgaagaatggaggggcgttccgaatagctgttgaaaataaatgtcagctgcttcaaataatagttacaacatacacatcgggggccatgatccatcaacgccatgccatgcatgcatgcatgcatatgcgagaacgaacgaaaatgtacattgtacacgttgaccgctcttaaaaaaaagaaaagaaaagaaaagaacacttactgtcgttcacaagactcatgaccaagaacggcatcaggctgccctccacgtagtgcatgaagtagcggtagcgcatccactcctcggtctctccacccacttggccctcgctgcccgttgtgtagcgttgtggtactagcgtcgggcgcgcgttaccaaagtggtcacagaggtattccatgatcgcccccgactccgccagcactagcggttttgcggcgcccggtgcttggatggtcactataggtgacttgcccagtgggtggacctctttcaactcggccggagcgagcttgtcggcgcggcgtttgaaggtcttgagttcatattccagtttcagttcttctaagagccagaggatgcggtggcttcgggattgctcgagcctggatttatgttagttagtatgattctgagcaatttgtgatggggcgtaccaatagagtgtgatcttgcagccttgattgttggccatgatttgttaatattatgaatattgtatagttgaaataaaaaatgtcgagtcatgaaaaaagaaaacaggactttcaagtttaagtgcccacacgtggatgatgtcaagatgggaccgaggcaggtttatctcccagaagggataaacggccgagactagctgatcttgtgttcatatttcgatcttgttgcaatattgattattatatcaatcggattcagatcttactgtgttgtgcagtgattattttatcatgtgaagatgtctgcttggtgcggcgactatccgtcgtcaattatgtatttgctgcgtggcttatcgacctgttcgtgttgatcttccccgcactatcaggcctcaccagctatacatagattatatagattattcagctctgcagctaagggagcattgatgtgagaaggacctggatcgaggctgagcatctcgtattttcatgacagatcacatgtgggtgttctccgcggttgaatatatattgatacccgactattctcgcctgtttacgagcctcatatcgatgatgaataatatgttgattcgtagattccaaatacaaacgcatgtttatgtctatatatactccggctttagagtctcaccggctccgcgtcaagcggaaccaacacatgtccctccgtaaccaaggagttcttgcacgagcgagctgcagccaagtccgatagattgccgagtgtaacctcggcgatctcctcgagggcctcacgcgtgaagaacccctggtgaccacagatcaagacattagggaatgtcatcagacgcatcaacacatcgtcgtcgatgatctccccagagtgatcattatagaaaagctcgccttccgcttcgtacacatccaacgccaacccgcccagctgcctcgtcttcagcgcctggatgacagccgtggaatcgatgagtccaccgcgcgaggtattaaccagcaaagacccgggtctaatgcgcgccaacgtctcctcattgataagatgcttcgtctcctccgtgagcgggcagtgcagactaacgatatggctctcctgcagcagggtatcgagatccactagcgtcccatacggacggaactcttcaccggcaaacgggtcgtgcgcaagcagtcggcacccgaagccgtgaaagatgcgggcggctgcaagcccaatgcgccccacgccgacgatccccacggtcttgccatgcagggtattcccgagcagaccttcaatattgaaattgccctcgcgcacgcggttgtaggcgcggtgcgtcttgcgatttaaggtttggatcagggcgacggcgaactccgccacggcttcgggcgaataggccgggacattcgccacgaagaggccgagctcttcggcggttgcgaggtggacgtggttgaatcccgcgcagcggagcaggatcgcccgaatcccgtaggcgtagagagatcgcagcacgcgctcgtcgagggtgtcgttgacgaagacgcacactgcgtcgcagccttgggctaggggcacggtctcttcggacagcgcgaaggcatggtattggatggtgcacaggtcggggaagtgctgctcgcgcacctggtcgagataggtgcggtcgtaagatttggcgctaaagacggcgagcttcatgatggcgtatgtgttgtgatcttgccccgcggggtttggatgttggactaccattgccaagtcatgacgccatatcgtatgacacctgcaagcggccgttttggtcagtcgtaggttgtatatctaggttcttccccagattttccgattgcaacccgcatttgcagatctatattctgtattcaactggagatcgggatcgggatttgatctgaatactacctacccacgtggtagtgttcctgtatgcatcagccatggggcggaatagtcatgcactactctgtacagagtagttagttactgaaagcagttcacaacttctctaattgaagtatgtaataacacctcggcaagctaccaatgtcccacttcccgaggtcttctggacgattacttttttcagacatgcaggcaattcctaatttccattgcgcacgagttgattggacccgtcggtctcacgacttccgcggctccggtagccgctggcgggcaaggccaataggaagatggaggcgataacagccaatcagcagtcgatgataagaagagacgccccgggcattctggttggctgtgtcgttagcccgacgctagcgaacctaaggaatcccgacgttttcccttttcctgttttcttcatttcctaattttcagttttggatagatgagggcagtgaagctacatggtacatgaatgttagatattgaatctgtttaaagatcattccaagactgtagggagaacagagcacgagtagagaccaacacagtcttacacacaatataattatgcgaaccttggaacctcaggtagatcggaaatgaacccatcggacttaagtggagagaccgcaaaaggaaacccgtcactggggcttcatccagcggtctgaattcgattaatcacaaatagcggtcaaaaggagggcggatgtgtaggttgtagtgaggatgctgatttcaaggaagaacaaagtacaacatacatagttcgtgacaagaaggaatagagtcccagtacgcggaaaagacacacgggctacgagtacttgccgctacctggcccctgcgcgtgagtagtacccgccccgaagtaccgcaaagtacctagtatagagtgctaagtaccttcatgtatgtcgtacctcaagtaacagtatcattgtcctcgtgtacttcatggaggagcatatcgcagaggaggatgcttctcactcgacttcacctcctccctcacctcctttcgccctatttattggcctctcgtctgccactgtcactgttcacccgttccctctccatcttctccactgaacccactctgtgcgtaagaaatacggagtagcctcggccacttacagtcaaccttttcttcttgcctccccggctgaacggctctgtctattgtccttcgattaatcccaactcctttttgcccctcggtatctgcacttttcgccgctgcgctggagattaccctttaactctactttaaacattccgcctcccacctttcaattcgtcacctaacattcatcctcttcccatatctcaacttcaacttctacctcaactcaactcaactcaacctccacttacatcctttcattatggcgactcgtgttatgaccaccagcccggctaccaaccaaatctcggtctatggtcagccctcgccaaccaactccgtcaccaacactccctccaacaattctcccacctcccctcgcatgtccactgcgtctctgcaccaactgcctctgcagtcgcgccagctgcgtcctctcaagggtcccctctatgtccctgcagctctgcgacctaccgagcgaccccagaaatcgtctcctatcaccccacctcgcagcgtgcatggctctctcgacagtttaaacgaggactcagagccgatcactcgccgttccaccatggagagccagtccagcgaaattagcgagagcgcccagcacgaatggatgaagaatgagcacctgggtgaggtgaccggtcttccgacccgtacacactggaaagtgagtatctgagaaaaatatttccatctttccttccttgggcgtctttatagggattgggttcggtgtggattgcgcagttcttgagcaaatgtcgtgtgcgatcgtcattcctcggaaatggcgtgcttagtccaccgcctcatcccttgtcgcattccacatatatcctttgatcgcattggtcattggtcactttcttacaggtcaacttactaactttatccaggctgactctgcctcttccaactgtgattctcctacttgccgctcttcctttggcatcttcctgcgtcgccaccactgtcgtcactgcggtcacgtcttctgtgcttcccacacacctcacctcgttcctcttgaccaggatgcccgcttccaccccgatggtgtcccatcgcgcgcctgcgacctgtgctggagcgcccaccagcgctgggaagagaaccgctccgaccgtctgaacaagatccagcacaccatggatgctcagcagactggcatctccgtccccgattctatggacatgaatcgcgagcccaacgtggccgacgccgccgcctccgttcctcgtgactggaactggagcactttctaagcgcattgcctgtctcctttggtcttcggtcactgtgactagacctgcaactcggcgtttcacttgatctttttatcatcttttcactttatcgagtcgtgctcagcgtgacctgtttttcttattggcgaccatggctcggcgtttctcacaagccctggaccctgggctttgtttctgttttctgcagtcattttatgactatgcatcatgcctagaggttctcatcggtccttagcgacccgtttatgtttctgctttctttttttccgccttgcgttgatcagacactcatcggtctctagcggtccgattgatctttacttctgattctgttttttgcttcgcgttgatctggataccccgtcggttttttattgcggcgcgatctcatttgatgtttcttctttcctagaccctgatccgatgcctgagggaatgcgcttgcaatttcccagttgatatctagttcgatttagttcgatctagttgaatccaatccaatccattgatattgatattgaaccttgacctctctcaactcgtagacaatgtctaccctctatactttatcatcctgtagatctatttatccaaaaccaaccgccggaacatcccaacatgctcaatcccctcctccacccaccttcccatcgactcatccgtcacaaacccaagcccagcgtacatcccctcgacatcaacctgcgcatgcacaagcaccaatccccgccacggacccagatcggcacccgccccccttctccccctcgcaatccccgccacagcctcatcaatctcccccgcatgcccagccgcccaccccaacgcaacctccaccaaccgccgcccaagtcctagaccccgaaaccccggcataaccgccacccgcgtcagcttaacacagggctcgtgcgtccaatcgtattcccctcccgctgaagattcaggatccgtggtctgcgcgtgcgatacctgcggcgggggcactagtcggattgttcccactggcgtgctggtcgagtcgttgtataggacccagtgccagctgcggggatcgtcactgtcaatttctgtggatgcggtgcagtgttgctcgtctatgaagacggttttgcggatttttattgcgtcgttgaacacttttgggtttgtggtgtcggtgccggtgtcgaggactagtttggcgtttgggcctgggggtggttgtattgatgtactgaattttgggatttgtgccattgtgttggtatggatattgggtcttgactcttcaatggtaagtaatgatggtggagatttggggggtggaggagttagttaggtcgtagtagagggccgatcctgatatagatctaggcgagatcagccgacattgaacgctacctacgcttgattggaatataattgaatatgaagatactatactcttatcgtagtgaaactatcacatcttaagccaatataataagccatgacagccgtgtagttatctagtcccaagggctgtatacatccaatgcaaacagaacaaacaacatcaaatatcaaaccgatcgcaaaaatcctcaattccccgaccaacattccacaatccaaatgtccctctacttcgatgcagtcgcaatcctgaccgcgccctcctcaggcggctccttcaagtcgcgagtctacagcgcccgcaacctacgcgcctctccagcccagatctacgcactgatcaccgaggccgcaaaatgggacactgtgctagcagatgtgatagacaaatccggtattctcgcactagagcgcaaggtgagctgaccccaagaaaaccaccagatatacctacctactgactgaccaagtgatttccctctagctcactcccctcctcgctctcctcctcgtccatgaccacctcctcgcgaagaagggcattgccgcgccggcaacgcacacactccgccagacggtggagcgccacaaggccaggctgaaggccgagttcacgaaagcgcgcgtgcgtcgtggatgcgcttccgtcgagcaattcaaggctgttgtcgtgcgcgagaaacggctcgctgatgggacgagccatttcgtctacccgcgctgggtgcgcgttaataatatccgcacgacgcttgaagagcagctggatactacgttcaaggcttatcgtcgcgtagagagtcttgcggaattggcgccggaagacgagatggaaagtaggaagccggagccgaggttgtttgttgatcctaatattccggacttggtggctgtgccgttcggtgcggattttactgcttcgtcggcttacaagaatggggagattattcttcaggacaaggcttcttgcttcccggcgtatttattgttaggtgaccgcgggcctggggacccgtgggagggtgacttggttgatggatgtgctgcgccggggaacaagactacgcatttggcgtcgcttctggcgaagcagcaaaaggggaataagaacagcagacagagaatcttttctatggatgcatctatcacccgttctaggacgctgcagaaaatggttggcttggctggggctgactcggtcactgtgctgcagggtcaggatttcctcgccctggacccagaagatgaacagtttgagaaagttactgggttgctgttggatcccagttgttctggtagcggcatcatcgggcgtgacgaggtccctcagttcacactccctgctgcggcaccatacaaggcgcccaagtcacatggaaagaaaagaaagcgtgcggacaacgaggaagaagcagatggccagtcgaaagttaccattggaacgccgcaggtagcgcccaccgatgaaaatgatatcccagatggcacggtcgacccagagcgactgaccaaactatcaagcatccaagcgcggatcgttgaacacgctttgcgtttcccgaatgctacccatgtgacgtacagcacttgttctattcacctgattgagaacgagggcgttgtggctcgcattctgaattcccaggtcgccaaagagcgcggctggcgtctcctgcgacgtgatgagcagcctgagggcttgcgtcggtggaagaaacgaggcgtgcgagaggagcggccggcggagggagagacggggccatcgggctcggtagatctctccgacgaggcactcgaagcgtgcatccgatcctggcaaggcgacgcagaaggtcttggaggatttttcgtcgctggattcattcgggaccctgctcatgtcacggccgttccagcgaaggaaagtagacatgatgagagtgaaggtgaaaaagatgaaaaggacgaagacgacgaagaatggggaggattctccgattagacaaaagtaaataaatgcaagtttgcccagcctgaaacattcccaaggcatcttttaccatacatccaagtcctcggcgtattatgcagtttaagacttgaacagatgtacagacgactaaaggaatttccgtgaccggtttcggacctgcgagctggtatagatgtccaacttgacagcaaccaagacaacctcgtatatcccggtaggcccggtctgcacttgcaagcgccattgtccagtccgaacaacccagggcttatcgtccgtattatcgacccgtggacgtttggctggaggcacactatcagcgccagcgccagcttcagccttagctctcgatatcatcaaatgatgagggtcttgttctccatccacggtgagatcagtttcactgtcgacacggaccttgagtggaacttggcccaatggcggatgtgaatcaggcaggtttaatttcttgccaaccgtctgtagcaaactgacaattctttgtttcgaaaggcctaggaagtcaacacgcatggtcccacgatgaatcagactagactcgtcgccgatctcaaccaccagatcggcggcgttgtcgtctataaacggacgcgcgtatgtgaccattcgacccgacccagaaaccgtattcaagatacactgaaccccagacggccgtacatcctcgagccggatgacgatttccaaacgatggctgaagggattcgtcgttatctgatgcggtatcaacttttgttccaggccgtgcagatggaaataacgacagtcgcgcaggagcgcagcccgatgatcttcgtttctaatatgtagcggatacccgcgcagcagatgcaggagctcgtcgaagacatccgcggatcgattcggcacgcttgggggaacaatggccgggggtcgcaatagaccctgacggtccaggcccgggaacacttcagacggggaagcgaagaaggcggcgaatccgagggtgaagaaattcggggtatcgcctggacctgaaaatatatcgcgggggatctggaagtgtcggtcgccgatttgaataaagcattcggactcgaacagctgggacatcaatcggggcactgttggtcagcatacttctagggtacgggtacctggacagaaaatgctcacatgtgtagaattgcgcatctgcgaatagcttcacgaactgcgcgccatcttgcggccggacatggtagcctggatgcacccatcagcctctgtcacgttgtgtttgtccatggaccctaccctgcagatgtctagcgatctcgtggaatgtcgtgggatcgcgatcgatataaagggtcctggtgttggctacatctggattctgaagcaattgaagctcgaagaagcgtgaaaagtaggatggagctgttggaagggtcagtgtgagttaagacagttagacgggagaacaagcgcgtttaccatcagaggcaattgaagcacccgacagacgaaaggtctcggaaccaatttggatagagaatactttctctctcggcagactacatttagagcgagtgggagtgggcttgtccatcttttgatgcgaaggtcgaggtcggagcggagaaattacattttgcctgacgactaccggctacctacgacataggtacactacacacacactacgcatacacttcacacatactacacactacaattataccactgagccaacttgaagttacctgaaattgaaactagtttaattggacctgaattttctatccacgctggctccagtctcagctcaccttgagtctcacatggcgctgaaactcggcaattctccccacagacgtgccagtcagcccctggcttccgagaaagaggggcggatctgcctctccaggaaacttaggccgtgaaacggtcaggtaaaatggagacttgcacggtcttgactggtcgagatactcaattactccaccgccacaagagtcaaaagcttcactacggagtccttctccactcgaccgaggctgctatctttgggtcgcgaggctggctgaccgtcgcctaaagttactggaagagcagtccatacagagtactttgtctatgactatccacgctaaagatgaaccaggttggactctgcatacgtacctgttgtcatagtgggaccttgtcgagctagtactaggtattataaacatctgtaccgtgctcaggtgcttctgtctccttgctcccaaatctctttcttattctcatcctaccattcatcctatactactggggcttgatctacgacagctttgtctgctctagtccttgcaacatgccaaccctcgctgtttccacatacaccccgagggatgtccctcttccgccagcgccgtcggccacttacttctcggagttgcagtggaaaaccttctatgcgctggccgacgcagttgtgccctctatccacactgcagcaactaccaagtcatcgaacgaccgggtgatttcaaatgcagagtggaattccgccgtgtcgagcttgtcaacggctatctctggacctgacgccgtaaaccttgccacccagtacctgcaagaaaatgtctcttcgaacccgcaattccgggccgcagtggagcgactcctgggcgactatgtgaatgacgagggaagaaatgggtttggtttcatcatgtcagcgctcaacacccgtgctggttctctggtcatgacgggctccaccactccgatccaggaccaaccgattgaattccgagaaaagatcttgcgcggatgggacacctctcgattggctcctctccgcgccatctaccgaggactcacggccattgttaagaagtgttgggttatcagcagtccaaccataagcccggttctggggttcccaagcatccctattcatggcgagcaggtcgacggtttccagtttgagtttttgcagttcccttctggggatcagccagaaacgattgaaaccgacgtcgttatcgtgggaagtggctgcggcggtagcgtggctgcaaagaacctcgccgaagcgggctatcgagtgctggtggtggaaaagtcctattcatacccgaccaacacgttccccatgggcgcgaatgagggatataccaacatgttcgagaacgggggcgctgtctccagtgacgatggctcgatggcggtcctagcgggctcaacgtggggtggtggtggtaccgtgaattggtcggccgctttacagacccaggggtatgtccgacagcaatgggcggatactggtctccctttcttcacctccctcgacttccagaaaagcttggaccgcgtctgtgatcgcatgggtgttaacgacgatcatgttgagcataactaccagaataaggtggttattgaaggcgcaaggaaactgggatatgccgtgaaaacagttccccagaatacaggtcacggcgaacactactgtgggtattgcacgttaggatgcgcgtcgggtgggaagaaaggcccaacggagtcgttccttgtggatgctgctcaggccggcgcaaaattcatcgaaggattccgtgccgacaaagtgctattcaccaccgtcaaaggcaaaaaggttgcttctggcgtacaaggaacttggaagtcacgggattcatacttgggcctcgctggtattggggctgtggaacgtcggctgattatcaaggctaagaaagtagttgtatcagctggcacattgcaaagtcctcttctgctgttgcgtagtggtttgaagaatcctcagattggccgaaaccttcatcttcaccctggtaagaactttctttcacagcacattttacaggcacttattttcttctacagtgcttgcggctagtgctgtctttgatgaggatactcacccctgggaaggctctgcgttgacaacggttgtcaccgagtttgaggaccttgatggaaatggacatggtgcgaagattgagactgccgcaatgttgccttccgtggtcattcctatcttcccctggcgagactcattggagtataagatgtgggcggccaagatgcgtcacagcacgagcttcatcgtcttaaccaaagaacgcgatactggtcgtgtctacccagatccggtcgatggacgctgccggattgattacacggtatctgcctttgaccggaaacacatggtggagaccctgattggcatcgccaagattgcgtatatctcaggagccaaagagttccatactgtttaccgcgaccttccccccttcatccggccagagacttcagaccccgaggcccctgaaggcattaacaatacggctctgcagagttggattgccgagcttcgtgcgaagtcccctttgaacccggagcgtggtttgtttgccagtgcacaccagatgggtacctgccgcatgagcaagtcacctaaattaggtgtggtggacccgaattgtcaagtctggggcactgacgggttgtatgtcgtggatgcgtccgtgttccctagcgccagcggtgtgaatccgatggtcactaatatgggtatcgccgattgggccagccgaaacctcgcgcgggcgatgggaacggtaccaggcgagggcaacgtgatggctcgtctgtgatgtcatggtagattgaccgctactagttctagattatatgatatgcctagcatgattttgtattaaaatctatctcttcctcaggtttagttagtttcgttataagactcgttataagattgaggtgcttgatgaagccgaatatcatgtctaattctttccctgatcgggcgctaatgctatttctcatttatcatgttgaatctaagccttgggatcctgacgcttctcaataaattgcttctcaccaaaggcctccttgacgccctcggtctcgagagtgcgctcataccaagcgaccacggaggggtactttgcgcgcatttcagcatcgatagccatggagaaaccccagaccagggcagcggcaacggtgatatcagccaagctgagcttttccttgctcgcgaaccaagtgcggcccttgaggtgagtctcgagacattccaacgagcgttccagacgcgcgaggttggtctcctcgactttctcatcgaagggccggataccgagacgcggcagcgccaactgcgtcacagggtccaaaatctcaccctgcgcaaagcagatccactggcggatagtagcgcgctcggcggaggtagcgccagtaagctgagcggcagcggggccgctctcggcaatgtattgggtgatggcgtctgactcgaatagggttgttccgtcggcaccctcgaaggcgggcactttacccaaagggaacttggacaggaaatccggggtccggttggtcttgcccatggcgaattccggaaccgccacttctaggccgttcagcttggccgcggccagggcctagcaggggttgttagcgcgtgattgcatgctgacagggggtcgagattggtaccttcatgacccggggactgggctgataagagtagatagtgccgaatggtgccatttcgatcgtgatgaggtgagatacaggtacattgtagaattgaggggtatgttttatatgaagctaaagagcggggcggaatcaggtggaaccggatttctaagctggtgagctgatttgaagcacaaaacaggaattgcgcggtttgacatatatctttgtcgttttatataaactcaggagatccatgtgaaattactagcaactggttatcaattcagtatgaaggagcttaactcgcgccaaatccgactcaagtggcccaccttcgtgagcacagtcagaacttaatgtcgacaagtctccctcggctgttacggcgagggtcacctgcacaactggcccgtatggctcgacgtactcgctgagtaagcgccaggggtattcacacaccgcggacatgggattagaaccttagcgattagtctactcaattgcatgagccatcttgggaacctccactctagttcgaaacctccatttcaggatacgctagtagctagtcctaacatcagctttttgtctcttcggaccgaaacagttaaatatacaagaaattagggtcaaaatcaaaatacaaggaatcgcagcacatcccagatctactaggtcacgccttgcatgcctcaccgaggcgcatatagttccaacaaactgcaagttgggtcagcttttcacttcacaatttcggggtaataaagacgcactcgtatgtcccatgtccttgccaaacaagctcttcatcagatcttcgccatcgcgtgtgccctcgctcgggatataactgacggccgttttaccgagagcgaggcccatcacagacgggaacggctccaaggtctgatactctggctttccaccggtgcactctgccagcatatgctggtggatattcatcgccgcgtaatggcccatatgcattgcaccaccacaacgcttaatgccttcccactcagtgaggtctcctactgcccaatgatgctctgcgttagggacggcaccggagaattgcagtctgcagaggtattagaaatgtttgtgcgcaacttggtggaggaatagtcttacgagcggtgcactttgatgtatccctcctcattcaatacctctttcggcagatatgtcgatgttggaacgcttcgggagacggcgtttagaacatggcccgttctgagcttttggccatcgctgagtgtgagatcccaggtccgtgtcccatttttaccgtccacagcggtcgtttcgataacgcgttgtcctaggataacctcgacgcctgtatcgcgcaatatagtacctacgcgctcggcaaattcatcgggcaacggctccgaagataacaagcgctttcgagagtggatcagagtgatcttctggtctgggttaaggattttcaattcggcagccatctccacgcccacggcgcctatccagaaagacatgttagcgggtggaagtatcaaagagggagggagcacacgtacctccaccaacaataaccacaccctcacgggcttccttcacatccgtcatatgttgtctagcctctttgaggaactcatctcgccgcagggactggggaacagtggggaaagaccgacgcagcccggagcctgcaatcaagtagtcatagggctccgtgcggttactgttggtctccgcatcgacaatattggcaactttagcattgaaatccaccgagctgacgcttccctggatgaatttgagttctgggcacttgagcccgggaatatcttggaaacgagtccatgcctcgggcgcgaacttttcacaggctagggcctttggggatccgatcaggtgaactacatatgtgagcgggggtgtaattgcgggggaattgtcgatccttggggagcttacagtagccatctcgcttatcgactacagttatctgtatcggaatacgatgtgtaggagctttggcatcgggattacagttgaaacgcgggagacgaccttgcgagagatcaatgagggttaatgcagcagatagaccgccataagagccaccgatcacaagcactcggaagttgcgtgatacagttcggacaaagtcattggatggcatggtgagctgagaaggagaggtgtgacgagcaataaccgaagaaagaggccgagaggaaagcggaaaaggagaaggaaagtaaaggagagaaaccgagaaaaaaagccaaggaactgagctatgtactcgaacaaaaataaagaaaatagttatatcgtcatatcgtcggattatgcgagtccggatcttatcagattgaaagcgacatcggatacagcgcatccatggttgttccttggctttctcttggctcggattatcagatccgagggcagccgtggaaggtgaaacatccctcggttgtattgaattcctccgacagcacagaccctagtaagccaagttttttttggcaggaccgacatggtggctgatacacgcaaaagcatatattaagtttccttccgtcaattgatcttcgtgtgtaatattaggatagaagagagctctatcacggcataattacatgcacaacgttgaatattgtatgaaccagaagtttgtttacggttggacccggtggctgtaatgcttgtaaagtaaaatacacttagttccgtggttcgatacagccacgcaacccaaaagagcagtgatcgtcgatcagacaagatgagcatctaatctgattctggaagtgctcgacccgacgtaacaaacgaagaaaatgcgtaacaaaatagcgcatttgctgcaagatccgcttttcgtcattctttatgtacttggcgttacaagcgttgagctcgggcgaatcacaatagaatctgataacatacgcccctcatttaattacattttttgtttcaaacagattttcggagttgcaattttattgtgcacgaggttcgtttgtcaatgggatcggggtattactgcaaaaaatctagtctctatactgggtgaacacgagggctgtacaatctgtgctccttcctttttttttttaattcgtcttctgacgctgggccagcaccgccatcgccatatcccgtagctccaccttgcgaactttgccgctccccgtcacaggaaccgtgctggaagccccctcttctccaaatacaaacacatgctgcggggctttgtgtcgacccaaagtttcacgtgtccatgcgcgcagttcgtcatcggtcggacgaccggcgcccgaagcgattgcgataaatgctccgacgacttcgccatatttgggatcagcaatgccaaccacagaggccaattcaattgagggatgcgcggccaatcgttcttcgatctcgaggggatatatgttttcgccgcctattcgataattagaaatcgcgatcaatgtctacggtggggtgcaagcttaccgcgaatgatgatgtccttgaagcgaccagtaattgtgcagtacccttcggcattgaaggaagcttcgtcgccagtcttgagccatttgacaccctccgcatcggttataaatgtctctgccgtcttctccgggttgtgccagtatcctttggtaagctggtagccggccatgcaaagctcaccacgctgaccaacgggaacgatgtttccctgggcatcgataatcttggcgcgagcgtggggcaaaacctttccgacggtggttaatcttgtgtggatgctgtcggtggtgaaagcattgaagcaggtaggcgaggcctcggtgagacctagacttggttagcacttgatcatcaagccaatgagagggatggtaccatagctactagtgtattcagtcatattcaattccgcgaagagccgcttcatgagtggccgcgggactggggccccagcaatgatgcctgtgcggaggtttgagctgtcaaagttggggggcttgggaacggcaaggatcgcctcaaacatggtggggacaccatgcagagcagtgcatttctcgtcggagatggcatgcagaaccgccttagggtcgaaggtttcgctggggaagacaattttggcgccatgggtgaccaccgcgagcatgcccaggaccagcccgaagcagtggaacaagggcggggggcagcacagaacatcaaaagaggtgaagtccatgcgatcaccgatgaaacgcgagttattaaccaagttactgcgcggggattagctatatttaacaacgaatcgtcgtacgtggtccacatactgatgagttaacatggcagctttaggactgcccgtcgaaccgcttgtgaattgcagattgcagacatcgtccggccgcaattcggcctcgcggtcctgaagcacatgtgcagcctgcgacagaccacgttccatgacatcgtgataggtggtgaaattgttgtaactttcgcggagaataacgatttcctccaatgattccgaggtcgcagactttttaggattagggcccagtttgagaaggacttcctcgagattatgacggccaatgcgtggtgtcatgaaaagcattcggcattctgaataaaagcagaacaaacagccgagattagtatggagtcaataatacggaagtggatatcacccaccactgtgattcaaagcgtaatacagctcggagggggtgtatgtgttgttcaaaacgaccaagatagccccaactcgtgcggccgcaaagaacaccgagatgtactgctcacaattgcccgccataattccgatgcggtcacctttttgaataccggaagccaacattccccgagcgagacgatcggtctcgtctttcagctggccgtacgtccatcgggcaccggtccaggggaagaccaagcactcaattcgcccatactgcagtgcttgcagcgtcagcagctcacccaaggtaatgtccagcagcgctggctccgtcgggcctgcgaccagagacagctgcggagtagtcggaggctgcacatgcgacagcgtctgctgcaagcgctgtacacttctcggggccgccatgataggtagattgaaaggtaaggaaaaaggaaatcaggaaaaaaaacctaggacatagcgggtttatagatgtagccgacaataccgcgacaaatttcgcacaagataaatttgattaattcgattaattccattccatcagatagcccgggctccacatcggagctgttgtattggtaatttcacgggtttggcttttatgcttggttgactcgacgccttggcgtctgacaagactccactcggtcttcaagcgaaccttggaaccttggcaggatacgcaagctccgagggtccttgtaggtcgatgtatacatcgaagatggtccctgcatataacgaaagtacttactgcgtatgtgtttgcattctatagggcatctgcaaggtactgggaatgtttcccatgtacataatccgatattgatcgatcgaaaaggctgcaaactctagcctacccttgtgaggagctagttcatgacatgaattttgctgcttacggtggactgacaccggaaatttgactgtctgcaaaatataagatatttgaatcttttcgtaagacatctacatcggtacaagtagaatcctctcctcggtcatctccccggggatcgtctggtaaatttcctgtcacggtagtatggcccaggcttggatgtcaggatctaaccggcattgaataacagaaaaaaaactccctcgtggcactggaccccactcaggatcagataaattgtctgcagaattccatcccgggttatcaatcagtgtgaagatgtccaagtggagcccgttgtcgacgagcccgggacacacgtgtgagttggtgggaatacataattggaggcactgactcttggcacatcctggcattctgaaactagttttcgcttttcgtctgttggaacttgtaagacaaggaacaggcagtgggtcacagcctagaccatctttgtcggatattgtaggcttagaagacccggtatataatatataattcaccagcttcatcaaaatctacctcgccatatataacaacacagctaccatttaccattgtacgagttatgcaactctggtctatacctagggcttgggaatctaatcaatcgggctgatctaatcaatcattcccgacatcggcgccttcgtgtgggacccacctaaaaataccataaataccgctcgaaagattcaatgaatgttacagagaattagtagggaattggcaggcaaaaatagtactccgtagtctatactaggtacgaagtactgtatgtactccgtaccaggtacatatatgcattgggtataaaaaagctaattattgcgtaatatgcacggagtatgtcaaggggctttgtcgtatgtcaagatccaatccactagggctgaatgccggcgtcctagttgggcttctatatttgttctagacttgatgttaatataattgatggagtgcttagaggccttcttaatttacattggactaaccctcactactagttacgtcatggttgctttattaattattgtaacttcatttctcgttgggctgtctgtctagctgttgagagtggactactctatcattgcttgtcaaccgaacaacaaagattccccatacgatcagattaaatcagattgatagaaagcaggtgcaaaaagcctatcattggcatactctgaatgcaaatagcaaacacaagacatggatacatctcaggtagacggcaaattagtacataggattctacacgccgaacttatggccctttggtacagaaagatcgggacaacctttccagtcgcaggtgttctgctaatagttagtataagtaattgaacgtcagagggggtaaacacaccttgtaaacctctgttccccaccatttgaaatggttgctggctccagtaaagaaaattgtcaagaaaatcaagacaccagcaattcccactgacgagtccatggcagaactcagcacaaagttatacttactccaccagctatgcagacgcttccgaatgagccagccaaaggtgagtccaacaactgcccagcttccgtaattcattccggtcgcagggggcaagtaattgagcccaccgaggaacaggggaatatgaacccttctccacagtgacttggggtatcggcgggtcatataatagacgggaatgggtagaatggcaccgacgatgaagaaataaagcaaagcggaatagccaatttggtttgagaagtaacgacgaggacccactgcaccccagatcaaggaagtattgaagtgggttctgctgtaaggacaagtgaaaccgttaacagcagcgctagtgcagacgccggtgatatgattcagggcccaattgaggacaccgagcgaggagagcgtgccgataaccattcccacgcattgaaccaagaacagttttcgttgcgggatcttccgggtattagcatgattcaactatagtaggaaggaaagggcttgcatggcaatagtaagcgagtttcatatcctgggcaaagtaaagacccttgatggttgtgatgtatccgatgtcaaagaaccagatattggccaggactttgccctcaaagacgaaaccggccacgatacggcagaagatgtcgatattgatcttgaggttagaagtggcatagaccagggccaactaagattggtcagagaggtgtccaatgtgtaaatcggaacttcaggtagactcaccgcaggataaaatatcagtgccacagtacacgccagcagaacaccgtaccatctcagttcaacgttccaccactcaacggcgaacatcgacatgaataaggctaagacgcatgcaaccaggtaccaccacaaaggcacatctgggtctccccgctcgtcctcgctgtactctctagagcgaccgggaaaagactccaggactagccgaggcacccttttggcagcatcggccatgacatgacgcttttcaaggacaacccaaacaagaagagcgctcagggtcgcaaatgagagcccaaacatgttcaacgcgtaggtcactggcatatagacctaaacgttccacaagttagcagaatgtcaagttttttgagtttatagaacgtgtaaacataccggggaataagcaaggtacttcttaacatcgagcttgtagcctgaggctgcattgacaatctttttgactttataaatattcccggtattgtcgaatactgtttgcacaagttagatttggtcgggagcttgaaaggatgggttgtaccttgagagctttggaaaggcaggtagcctgtgttccacacattggaatagtatagagcaacagccacaatccaaatccagaacaccagggaaacgaagacgttgaaaactgcccacgatgggatgagcaagggtgatccgacgtaagatatttggctccctattggggtcagcacggtaattgacctgaaaggttgtgatactcacaatcaaatgtaagcggcaacagccccattccagaattcattccgaagatctgattgactactttgctctcaggcttgatccaacacgggaagctgaaatagctaagcgccgggaagatgaagtctgggaaccaataccagcagaacgagatggaaaatgccataccgaagaaggcatagcgggacattttccaagtattgtaactaccatctatcagttccattcaccgagacaacaaataaatacagggaacttacgtcacttgcactttttgctggttgacatgatgcagcgttgtggtcaacgcagtaacacccagcaccccaggccagatcagctcttggggaacgaccacaatcgcccggaatagaccagcaagacagaacccgatgaggaatgtggagaaagtaatgagaatttggaatccccatcctgctttgtaaccgtagaacatttgctgctctgtcaggacatcggcgccaagacgaacgtagatactgaggttggacataataaagatcaagacatgttcctagaataacctttgttaaactgattactgtgacgttgccagggaacatacctttgtattaaaaggacccgggttgagctcaaatgccagtcgtcctagaggaacggtccagttcgggacgattttctcccaaagctttcccaggggataagccaacaagaggacaaccgagccggaaattgtcaaggaaggtgcacggagcgtgtagagtgtgttcaacccgctaacgatgacacaaaaggcaattcctatcacccacatacgtagagtgaggacgggctcagtaggatcatctttagctatacctataccagcagcccgcaagatttcggtctgtgaatctatgtctgcagtggtgtgagaatctcgcaaaaaaagaaggaaaaaaaccccaagccacagcaacaggcagcagcagacttaccggaatcggtattattttcatcctgaacttcttccttttcccgaatgtttctctccagcaggttaatatctgtgtccttgttggcttccatgatgggcatgaaggaaaatgagatagaaagaaggatcagataaaaggatcagataaatagacaacatcagataagatgcagaaagaacgtgtaatccggatgcaacctcggactcgatccgtagaaatacacgaagtccgtattcccacggttctcagccctatagggctggctctcaggggagacaagcttcattctctgtctggtccagcgtgttattggacaggttccagttcaagcggggctgtaatactaagccagagtatgttgttgcctagttaggaaatacccacactcaacgacacctggtttagctttagtcagtgtctagatcttacaggtcagatcattttggttattttccgattagggcatgattttctcgcctctaacagaaactttgggctttccttactttgtagactaccaacaagtagttagtttgtaggagtactgcatatagtagttaattgagccactagtatacaacatatttccaaactctcccagtgatggaccattatagaaccaccgagaaagaacaaaaagcttccactgtgggaaccttaagtgtccactcaaactctttacaagccttctcgtgtcattttacaggcatggttttatcggccgaggcacgttcccttggcccataaaaccaaggtttacggtctccacggtaagcatttggatcctttctcagtggacaagttcgggttaggagtgataggacccctcttgtggacaaagtcaaacaagacactaatacggagtactaaaatagcagcctccaggcgtggctcttctgggaaccgtacggatgtactcgtaaagaatggatgtatgacgctcaagccatagaggtgtcatagggccgccatatagactcgcataattcgataaatgcagcgatgcaaatcaacatcatcccggtatgtagaatataatgggccaactccacggcctatgtttctccagtcaccagtaaatcctcttctaccactgagacacgcactttgatgccccagccatctcgcccaccaatccaattcttccgctttccgaccttctggattttctgcacgtcattttcgagctcttctctcaggtgagacgggtcatcagccactttctggatggcaattgtcaagtccaggccttctttcttgcccttcttccccatgcccttcttccatcgggccgagggaacaatgcgaggcttagaggtgtcgacacgcccggttgggtacagctgggctaggacgaggccgagttttccaaggtaacgtgtccaccaaacttcctccggtgtcaagattccttgtagctgggtcttcaaatccatgtctctgggtggcagttctccgccataacgttcctggagcatcagtgccaggagggcacggtggtcatgtggaataccatgcgtggaggctaggatcccagtgctagtgctgtacagtgcggcacttgaggaaagttctttggccattgtggcatgataatagagggaattagcaaaggcctggataaggtgaagactgatggaaggcgggaatgatcggctggcagatggtcgaggaagggccgccaacaataaagcggccagtgcctgggccgacgaaggcgcgtgacgggccgtggcgacctccaaggggtcctgccgacggacaaccgggagcatctcacggaataacactccttcccgaactccaccttggcaaaaatgggcctctttgattccatacggtaatgactgcgccagggtattgactaagaatgccaccgaggggacttgcctgcgtcgccggtccgagacccggaagatttcatgtgctgtccgagccacctctttgagagctttggtgttctcaaagtctttcttgggtgcggaatacccattaataatcgagatggggtaactttggccttttgtctggtgcaggtataacagaagatagccccatccccgaaatcctcccccggacaggtagagaggaaagcccccttgctttcgggccttgtgaacaagctgctcagggacgtcgagggtatcaaaagcggcgcggaagttgtttgccatttcctcgcggaactcctctcgagctttgtgcgcatcctctttactttttccgcgtgcgaggtcggccagtttctgggtcaatgcagctgctccatagggaaagctgactgatccttgggagctcatatgcacgttgcccgcatgcgatatgatccaagtcatctgcatgctgccaccccccaaatcaagtgcgagtccctccacgtctgagaagctgctggcaattccccatgctccgattactccctcctgctcctttcgtaatgcttccaccgcaatcccggttttgtggaggatggcgtccatgaactcagaagcattgaaagcagttcgagttgcttccgtggcgataatccgaatgttctgagcaggaactccaatctccacgcaaacaatctggaaacggactattgcactaacgattcggtcgatgacattttgtggaatggggattcgattgcctgaatcgggatccagttgggcctcgtagagcgaaacattgacccgatgaaaatgtacagtagggatgacacgggtcgtaggaggggagagatctgagatggaacaacggatgccattactgtagtatttgaagtcagtgaacagtcctcacacgcacattcaaagggaacgaagaggggatttgatctgcctacctgcccaaatctaccaccgcatgaaggtacgcattctgccctggatccgcgggcggcttttggccattcaatactggaatttggcttcctcctcccatttaggcaattggttgaagttgctcaggtgtactttgtgcgttgaatctcgaaattcagctgcagaggacctctggggaaaaactgcgtgacatcatcattttcgaccgcccgctgttctgccggacaattgtagatgtgctgtagctcccaagtacattttgtttgtttaaaaagaatcttaatgttaaatatttgtaagacataaagaattccaactcttaacgagtctgtggtcatttaagttcattgtggtcggatacattgagtacatcgtagatacgcgttattctcggcaactggcaaggcatcaacccttgccttaggcttaggtaaggttatagatcacatgactagatttcacatatttgtcaataaaagcttccattaactgactggaatcttgcatggaaccttgtctgtaaatacctgagtaggtagttcaactacaaaagctttagcggagaaaattccgctggtgttgcaaattctgactctgtatgtatgtagccctagaggtacccatgtacccctcatatatatcacaagcattaatcataagatctattccgtacaaatccatacaatgaccacaagccgcaagtagagtaaatatgtattcaagtaaccgaaagcaaatcagataccaatagagtagtaaatatctacctggctcgttcacttcaatttcgaccctgaaatgggctgatccaatcatgatgtcacgtggcgttgtctaatcaatcagatcagataaggcgtctgttttaactagggggattccgagtccacaactcaaccccattccttttttttcctttcgagttctcttgagaaactccgtgtcagaatccgagccaattcttattcagacctcttccgaagtttggtcctacctacgagatccaacggtccaacgactcagagacttcgccgatccacatgggtccacctgattagtgcgattatcggcttactgccggtgctccgcctttcgtcttgagccgttccttcactcaccctcagaccggccgactatctgaggactcattatgttgctctgttggctggtaatcgcactcgcccaaggtggctgggctaatccagaggatgagcggtgtgtgacggcggtctacacggcatacaactacatatcatttgctggcattctctcacaaggcaagcacagctgggaatcgcaatgccggaatccgctcaaggtcgcatcgatatacgccgcatccgatatatattgcaatgagcaggaacggacgataggcatggcgcagctggctaaccagtgccaagaatatgggaacctagagctgctgtcgagggaagcggtcgccgaaaacctgacagacgatgctataaggaatatgagaattgtcgactatcaagagctgtcccgaggcgaaccagtgaatgcgcctgtccttctttctgcgtcttacttcaacctaatgttcaaaacgattgtgagaccttctggaccttgaatatgctagtcctaaagcttattgatgtcctaggaatcttgggaacttgtgacttggtcacatcatgcatttgggtaagtctgctcaagctggcaagcaagacatatattgattaatcagttatattggctacgcctattggggtggtatactatctttggggatggcctatcgcttgagtgattggctattccatcgccgacaacgccgtgtagagcgtgtactcgaatccaatgtatatcccctcatgaggtccttggacgatatgccgttggtgggcaccggtcttcactggatccagactcatctgatgatcccaccgcctttggcagcatcacatggtcgatacctgctaggcttcacattctccaccagagtcgaggcgcttatagtcgtgggattctggacgctcagcatcgtattgagtgtcgtgggctatcacacctttcccggaaatatttagtaggtaccagcctgtggaagcgagatgtgcaatgttgacaggtagtctagctggcccgatgtcacaagccaggttcttcgttattctgcagaccgcactgggatcatgtcatttgcgaatttgccccttctatggctctttgccggacgaaataatatttttctttgggccaccgggtggagctttgcatcgttcaatatattccatcgccatgtggcccgggtggctactatacaggcagtagtgcactctgtcctttacattgtcatgttccatcaaagtaagtattgctcgtttggctttcaatgcgcgctaggatacttacagtcattccgacagcgggcaaagctgcgaggggtatgtcgaagacctatgttttgtggggtattttggtaggccccccaatttaattgatcccaagttggtcgatctctaattcatgttgtattagggcacattcgtgatgattctgctgttgatcacctcattggatcggatccgaattgcgacatatgagctcttcttgattgctcatgtcgtactttcgattctcacccttgtcgcgtgcttttagtaagtacatccccgcgatgaaatttctgcatctatttctaacaattggcagccataccattatatttgaaggaaacgaatactggaagtacctgtggcccacggtagctttatgggtcgttgatcgattccttcgaattgtgaggttgtgttactgtaaccttcacgtgagtctctcaaacagacttgtgaaagtttctgagagccatatggtttacgacgaaacggccgacgtggtgcgattggaggtcatactaggaacgccttcactgcagccttcaccagggcagtactacttcctataccagccatttaggcttaccggctgggagagccatccttttaccgttggagcatggtcttacgaaataggggaccagacatcattggcgccaaaaaacgagggaaaatcaactagatcgcttgatgtttcgcatgtgccgcttcttgcaggcggtccctccgatcaagattatccagaaagctcagaaaacatgtcgaagcaggagaaattgtcgaagttgaacttgactttctgggtccgcccgtatgacggttggaccagacacttgcgccagcaatgtctgagctcaccagccaagactagcaaaacgaccattcttcttgaaggcccatacggagaaacctttcccctgtggaggtatgaatcagtcttgattatcgtcggtgggacaggaatagcgtcggctgtgccttatattcaagatcatctccgccggtctgttgaagactgggacgaaagccccgaaatggagaagacacgagtgcgagacatggagcttgtttggaccaccaaacaagcggcgttcataagagatgtctctcgccgggaactgaaacgtgccctcaaacgagaggacttcagcgcctctttttatgctacgcgtgattccaccgcatcctctgaagatcctaccgattttggattcgatatccagtcaggtcgaccccaccttcaatccctgatcatgagcagggcctgcgatgcatcctcggctggaagtagccttgcgatcctcgtatgtggcccacccagaatggcggatgaagcgcgcgccgcgacacatcttgcgatgcgacagggccaccgctcgatcaaatttgtggaggagtcttttacgtggtagcaaaggggctacatgagaacttttgtgatgagtatacgacaccatgcatatatactgatgaactgtgtagaggttttcgaggctagaacttgaccttttctttgttagatagacatagatagaatatcttgcccgtacgttgtatgtggcgagttccgggcttcacggttttcgcgttttccgcagtgggaattttcagactagaaagggtcactgaattcgacatacggagtactccgtaccgacgtgggaatggagatggggttgttgtggctgacagcggggcgtgatgcacgacgcaggagcctcctacgccacgcatacgactatcgatttcaagtcgagaatcaccaattctaaattgacctgttcaactgttaagcacagaaacatgagaaatggggcatcaatgcgataattcacgaaagaagagagaagatcgatgtggtgagaagtgatagatcggatttatcaactatccactacggaggaaccgagacgtcacacgcaacagaacaaatagcgctaccccatggccgaagatcacaacgagtaaccctgaattttgggttctcgtgactttcatatgcacctatgcatctcttcccgtcggagaaacataccggcagggtccgtcgatcgacaggggaaaacttgaacacggttatggatcgcttgaaagtcaataactcatgttggccaagcctttttccgctcaataattcacgggggcatccactccgctgcagcttcgatgctcggagaccatcgggtctttcttcccccatcagcttgaatgagaagatgagagaacggatgaagaactaggaaagttataaaaggaaagacctttccagtgatagttctttttatccatcattcaactctctcatcgtcaaaacctttcaagccctccaaatctacctaccttcttcaatcactttccacattctccaaaaaccgtcaaaatgaagttcttcgtccctgccttcctttttgctgctaccgccatggccctgcctggctcgggccatactgcttcccattccgacaacgaggtcgagaacgcagtgaatcagtgtggtaacggtgcccagatgtcttgctgcaacaccttccaccagaacaagaatatcacccagcataacgttggtgtcctctccaatgtcctcggtgccgttggcggcgagggtctcggcctaggccagggctgctctcagtttaacatccccgtctctggtaagtgatatatctatgccagtgaactaaagcatgagactgaccctattgtagtccttggtgccgctggcctgaccgacttcctcaagaagaactgccagcagaacgttgcctgctgccagaactccagctcccaggctgtatgtactcccccaagacgaagaagcggaacagagtcactaatcccaatagaacaacaacctcatcggtatcgccgccccttgtgtcagcttcggcagccttctgtaaattgcattccatcgagtgcatgcagccttttccgccctggacatatcaacgagaaccatcaaacttgttaattgtgacggtctctgcgggaagggctagtggatactagtacggagtatatatgtacacttgcaacgcctatcaggggcctgttttatccgatcttgtcaggccagctttctcaaatttgtgggaccgctgttcgtgagcgtggatcctgccattcatttctctttcgtttgtcaccagtctcggggcttttaattatatatatttattttttattgagaatagaatgtttttaatttgatatatttcgggtatagtgtcttccttctgaatggatcttgaaggggggactcgatttcgaaagcgcaacacatttcatgacagctattctactgtatctctaaccggatagcatcgtattgcacataaacagtggcaggtagaacggcagtctctatatccgttgcattgaaaggtaaatgcaatcgcagcacattgtcaccgacatgtaaccaatccgccgggaactccaatttcgatccgacctggtagcagctgacagcagaccgcacaatacagctgcttgattgattgaacccaacgacaagagtcagaggatctgcctgattgttgatatagctttccagtgacagattgttgtatgactcgaggggattccacacatccgtgttaccggctgcggtctttgcggccgctaattgcaaagttaatgtggctgttttgcgcttgttcaattgcttcgagtcaagcttgaaatgtatgttccagtcgtacgtcgtgtcatactcgacgtgggaatcctttgccgttggcccgaagaccgaccaatgggcagagttgagatcagtcgcagggtcgctagttccaatggtgtaattaacaccatcagggaaatcagagcgccagtcataggctccccaatatataagatactcggggggatgaagcggatgggttggatctctcgcatttccacgtcggaactcccctgacgacttgtcgggaatcccaattcgccagagctcagttcctgccgactcttgggtccaagtatcatgcagtgcagtctgccttcctgcatgaatgatgattccgtcgcgtacaaagtcgccgaaaatgccctctgcgtaaatagtgagtcggtatttcccttctttaacacgatcaatgctgaagcttccatcttgattgatatcagtccagtactgataggagcttggaacggcgctattatcttggaagtattggccgtcgacagtgagaatggcaattgggcgaacggctcccttgggaagcttcacggttcctctgacactgcctcgctggctagagggagcatacccgatgacatgctttgcaatagaatcatagaactcagcgttccaatgaggatctgctaattcttctgcctcggatctcagttcctcgagagatgccgagcccttgccgccattgaaaaggtaaaattggggaccgaaagttcgatcgaatccgtttgtgatgtttggcgtgccctctccatgatgatttgatacgatatagttgtacactataccgtccactgttaagtcggaatggagtggtccctaatagatgtcagccgctgcattccaccgtgctcgatatcgcttaccccataatatgtatcctagaataaatttgttagatgggattcgacctggtgagtattggagtaatatgaccaaccttggtattcatgactagccaagctccatatgttaccccatttgaggtgctgccgtcagcatatagaccatgaacagtactgtttctccattctaagaaaacaccatcatttagtcaatcagtaaccgtagaagataggggatcgaccatacgatttgagaatgtatatttagtaaaatattcagaaaattgggtgtagtacgcgtcgcttggcgtgttgttaaatgtccaggttgcatcttgaacaacaatctccttggaaatcgcgtccttgcctggcaggggtgcggtctggacctcgctagacgtcagatgcgtccaaagatcggtatttggacgaaacaaggtccggaactcctgcaagttgcgaagaaagggcgtggtctcattatggtaggccaatcggctgaacatatgcaaaccagtctcgccatcgcgcaggaaccagtactgttggaattgctgtcccgtcggagtatatgtgtcactcagaatcatgcctccgtatttggttccagttgaatctgtgccctgcactacctccgtgctcggggatgtggcaccggctgtgtagaagcccgaagggatacagtaacagtcgagatagggccctattccagtggatcccgactgagtgcccaacaagtcctggccatccaaagttagatcgactatctggccgacactcttctggaggacagccgtgaggcgagcattggcgagagtgatgtgagtctggttttctgcgatgtgtagcgccgtggcagcagtagcccctgccgtgaaggccgtcaataaggaagcccacatgtggggcatcggggtcgttggttttcttttgacagagtcatcgtcatgaattgtctttataaatgactctaatatgccgggaaatcaatagcccgaatcaaggattgcttgcggttccagttcggttccattcctctttgaacacggattttgagatccacgaatgaattgggaatccatgaatcataccaggaactcacggcttagtctagagagaacgcactccacatcaaccccaccgggggagagattatggggaactctggggatgcggggctttgacggagaaattgctcggtcattgctcacccgagttcgtcgctaaaggggatattttcatttctgagatgtacggtggtcgtattttcgatgaaatcgtatagttatctcatgaacatttcattgtacaggttagacatgttcatgtaaaattgacccatcctagccaagagtcggacatgtgttgcatattcccatcaagccaaccgagaaataagtcaggatcgtcgatatccacactgtcaagcaagctagcatcatcaatcaacttgtcactagtttcagtgtcttctacggcagaggagagaccttcgacggagagaacttggtccaagacatgacggattgccttttggccctgctgtgcgacacggtacatatagttagaatcattgggttgaatgatggtgtccagatatgccgcgaaaagagtcaaattttgaatgacttctgaacgaggaaactccggagaagagcttgttacaggcgatcgggatcgacggagtaattctgcacagagaacaccagcagaaggaagacccggtaagcatacctagtgagatttcagcgttccggctttctgccacaatcaaagctaaggtcaacttacattcagtccgatatctttgatgggttgtctagagcgagtcttctgggaaatcataataaccaatgttttcagtatctctcgagcgatgccaagaacttcctcgggttgcgtctgggtgcgtttgccgagggtccggtagagcaggaaatcgttgtagagaaactctatgtgaacctcgaaaaggagatcatattctactttggaaatgagtgccccgtcaatattaggtttccaatgaagaaattcgggtagtccctgtcgtaattggcgagattcgcgtgaaagctccctgagaatgtcagcaatgccctggctgtgaaattaaactgtcagcgtactcgaccctttggctgagattgtcgagttgccgactcagtgaaagttccaagaccttctcacggaaaacgctagtgatcaaggaaattcgaggccacgttcccttcatcaagcttgactccaaattccatccagtctcctcatccagtcgagcaatagccgcattacgaacagcggaatcggcaaatacttcctcaacgctcaagtcaagtggcatttgaatatcacagtagcgccagctgatgagcggcgggcggcctagaaaagtggcaagtcctttgtccataaaatacgccgcgaccatggttctttttcgcatctcagaaagaaagaatggagcatttttgctagaatcctgatgcagcccgagcgcaaacagcgttgtcgataactctcctaattttctccacggtcgaaagtctaaatcccgttagacaatgcgagcaggcaaaagaatgggataacgaaccactttcaccatagactattgccaaaagcgtgacctgatgcaatagaagccaggccacaatgtcattcacaattccagtgctatcacagaactgaagacatatgtctcccacagcagtcgcagttacagcgagactcttcggatccatcatattcggacgcatgaagacgcggtcactatgagggacccagtctgtggctagacctgttagagtaaagagcagcccaatcaactcccatctcccggccgcagcagactggaaattttcccatgtcattgaagggtacacatcaagcgcccggctatgcgtttcaaacagtttcttggacaaaaagaaagctcgctggttggtgttcataccctcggtttctggagagttccacatattctcaacgagagtaaaaaccatgttcgtgactggccaaccgagactccatccactccatatcttgaatcgagcggagacgacatccctataaaacggaagattctctagaagcgctaagacccgggcaccgagattgatccgcttttggtcaactggaaagttctcatggcctgtgaggtatggaattctgtcatgaaatccgtttctcgtatccgtgaacgcatcgcagtaactagtttgccctagaaatccaggggccgagactgacgcttttttccgagtccagaaatcggtctcattgggcagtcgattgatattactaggagtatctgattcgcacacaacgcggcgttttttagaagggcgtgttccagtgagtggctgcgttaatggtgctgggtgataggtacagtggagaccgcggcgctcacagcgtccacagatgggacttgtatgatcgcatcgcaactttgaggtacgacacggctcgcatgatgataattgaccattacggcggggagtcgccattataagacacctggttgattagaggattggcagtaaaaaaagagactgggaagtagtcgagcgtgttagctatacaacatagtatgtacttgtcggggctcggccctcggagctcggagttagatgactaatgatcgggtcctatccgggggccggtcgggggccgtacattccgtactccgtatggcggctcgttattatccgtctatgtgggatacctcagcctaagtcgggataatgagttatgtactctacagtacggaataaattcaaatggtattggataaagtatccggtgttcaaccatatattccaccatggtgttcaaggtgttcgacactactttacccacgagatttaccaatgcaaccatgtatgtcatgtgaatagtgtaatatagggggaaaagccaaattcggaatcggtgaaagagcgttagatcatcggcaatgaaccggcggaagaggcggatcttaattattaggcgacaaaagctaaaaataatgacaaccttggaaaggcgacgatggtggccggatcctggtgtcgaatcatgtgcccattcacattgaacgtaaatgaaagcgtcaaatagctgagatatcagtcggccgtcggcaaataagatcatcgcatattcccggggtggagctcggagaccccatgggacagcgccacccccgcacaacgggggagtgcacggactaggccccgtgttctgagagacaggagttttcctgagaggcaggcccttgcctttgacatcctgctccctccaactcggctcggtatatctcacttgtcgcccgcgatcatcgcaaataatcgccctattactgcaactaattccttgaccccccaccctacctgtccatccatggcgaagagacgtcaaaatcactcctgcgaacaatgcaggaaagcaaagaaagcctgtgatggctatattttaaatagcggcaaagccgtattcattgaagctgagagtacgttcaagcccctcgacaaccccctcttccccacacatccatcccttcggtgctcccacaaatatgaacagctagctaaaatgaatccaccgcaaagattctggcatgccctctccatgctcgtactgcattaggacaagcaaaacctgcagtctgaaccctcactggggccaagatgatcggcaaacagaagagggcttgtcgcgctcagaaaatatcggactagatgatgaacaacgccgggacaaaaggcagcgaattcagccaccagagaatgagatcgaggcgtcagtaacacccatttgtacggttccttgccaaacttcacccacagaacctttacatgcgcctctgccagaaaataacgtggttgattgggacgcgctgtctgcgcctgttgcccctcatcccattagtcagtcagccctcgcgggggctcttgcgggatacgataattgttcacacccaggggacccggggcaagtgagctccatagctgtacccgacaacaagcacgcagaccaggtcgaatataatggtttggatagcctcatggattcagcactggccaattccaccacccacgattctcactactcggactttaattcacaaaccttcatccctgatacaccccaaacgcttttctacaaccccaatcccgctttctccatatcttcagtgttggaggagagaggccaaaacgaattgtggagggggcacaaaaaacggaaagatatctgcgactcgcaagactattttgccatgacactgtctctatttggtgcgggccatctcgctatggaaaattcgaaccgagttctcatatccgagagccttctgcggatttatcatgatgttctagagaacaacctcgggtgctggttggcagaagatacatgcccatacaagatgcggcagaggcggcacgagccactttccatcaaccagagcccgagttcaggacaaataccgtccgaatggggcgtatcatggacaaaccgcatgtactgtcgtattaaacagctcgatcgatccgcccggtcggcaaagctgattcatctctctgcatcggaaaatcgagcggcttccaaagccctcgagctgtctatcatggcatttgccacgcagtgggcccagggaggacggcgatgggatggtcattggctggtaaataggtgcgaggatgaaggaatgcgcgacgaatttgggcagacactgcatcgatctgtttgggaatgtgcaaaccaggcgctccaagatgtcacccacgtggagtgttttagggtggtcttcgctgagttggttttcggtcttatacagaagccgtcgtcaaactatttcgatgcacgcgcaaaggataggcataacaccgatcagaacaaaagcttgaagccttcaacgctggcacaggtcatgagcatcattgatcagggggaaccgccggtattcattgagcgaggggctcgcaaaatccacgtgctcaaataccgattcaaagcgcgccaggcaggctttcacaatctcggcactaaactagacgagcaagtcccggtagagttcagtacggaagagacccagacggtcggcgtcttgtactggctcgcaatcatgtttgacacggtctcctcatccatgaatgagcggccagtcgtcgttcccgatgacgaatgccaacacgaagctgcacaggagacagtacgaaatcccactcaacccccgacctctagccgccggtgggaactcgacctctacgcccaggaggatcccgagaaggcactagccatgcgttggccttgcccgtacgagttcgtgatcagggccctccccagatcagcagctgtgaaagtgctgctcttccgctacatctcataccttcagaacgccttgaaaaatgccgaatgcaacaaagtcgtggaagacattatccaacgcacgatatgcgtgtaccgctactggatgaagacgcacggggctttattccgcgacctgaccagacactacgactcagtccctccgcggatcaagagctggttcccgtgtattagcatcccctggcatctgggctccctcatgctggccgacctgatcgagttcgtggatatgaacagtctcggctgcgatgactacatggcagagcgtgaagatgtctgtctggtaaccaaaattcggaaagaaagctcaatcgacatggcagaccttgcagctgtcctgacccctggacctttggggggaataggtctaaaccaactgccgggctttcacttcgccgtcaatgagagcccgcttttgactgagccctggacggtgcttctcgttcgggcgttttccaaagcttcaatattccacctgaaggaaatagaaaagctgcagaagtaccagcgtttcgtctttgatcatgagagcaaggccctgcagacgagtgtcgcacgcctcgagaactgtgttacggctctccgattcctgggtatcaagtcagcgatggccgaggctatttctatagtactatctgaatcgctgagtaaatgccgaactctgggctgattttttgacaagccaatatccccttttttgaatctcgtcatatgtgccgtttgctatgggcttacatgtttggtgttttgaattttgatatccatttcgtgcatcacgtttatttcaaggctatgttagagttcaagcttatctccattgaacaagtacaacctgacagatatgacctttttttcggctgaaaagaccttacttgatactaagtgagtgcgattgtttttgtgcgccaataattgctctatccatcctgtaatagttagccagtctacgcttctttctgccaggactcagcaagacatcatcatcaataaatcctcaagtcaacatgcagattcctccctccttcgacaaatggcggcatatatatggcatcctgctggacccccagtaaccttcggtatacaaatgccgcgtggatatcgcatcagccgatcatcgcacctacctataaggtgccagtcaaagaaaaccggtatccaacctgagcggtcacgtcgacctgaaggattctcaccctaattattaccctgtctattgtccactcgctcttcaatttacaattcagggatattaccaaccctacaaaatcagacatttgacctttcgcagagtgcgagtgattggtctgatttaattccgaagcaaacacaaaaaaaaaaaaaaaccatacaacagtgaggattcgctggtagtcacccacccaactactaactcaccggcgtgttgcttatagttatgcggtcaatagttcggtgggtgccgcccgggtgataaggtacgctatagacagggtgagaagccaggtgagaaatcacctaagtcgcgcgactaatgcattgaccccttcagctgaacagaatttcattggaccgtgtcgttccccttgatggcatcttggcatctacacatacctacaactagaagcattatacaccccaggcactaagcaggttgaccgtgcaatttgttgggatcatagcacatgaccttgtttgtcaggactgtcacatgccaactactaaatagtctcctctctcttctcttcttcttttccccttctcatcatcattaacggtgatcatcagcagttagcacgaatacatctttgcattgctgatctctattctcctgactcgctgtcacaattccaattggttggtctgcttataaagctttcttgaaatcggccgggcgtgcgccgcctccgtcgtccggtatggattgtggcttcctttgttctttggccggaagaaaggatcggatattagaccatcccaattcccttttacccggccactgcgggctttgtcccctagttacttcgtagcctaagggtacgatgggaagaccacgacttttgtgatatctcatcccgtgatttcttgctgtctgaaaattattggctcttggtggctcatcggtggttgtgttccccacgattgattggttactagcatgtccgtacatattggagtatagggaggatcgaaatcagttttaccacctacatacggagaatctttcttgaaccctccttctaaacatgctaatatcaatcttgtgacctctatctttatttatatatatatatacatttcgtttctaattttgggtttttctttctttctggatttcagcttgacctatttcatgtagatactgtatagttttaacttcaactttaatatgaattttcaaagtcactgagagactactatatccttttcagagttgatacgacttacctcgatcagattacattgatagttctttcagttatatcgataggcgataattacttctttcaagacagaaaccaattaaactgaatgcatttttttagatccagtcaagaatctagtgaccaactagaaggtattggattataactcttcaatcaagtaagactaattgaataagcataccatagagtcattgtccagtctaacagactataacgttctagagtccgttacaaccacatataccggacaattcgcgttacttacattctcgcaataataataaacgaaacctttaaccaggtcagccaataagcagtacagcataagaaatagcacaatatacccactatatatcctagtccttccgtaactcctttatcgagctacctaatcctctttctctatgccataataacacttcaaacggcttcatcttcctctctatacgaaagagcataaaagcattatcctagtgactgaaaagcctatcccttgagtcaaataggtctaaagaactatctaggctcacagtatatctccaacagccttctctcttcagaacactattcaacttctatatttattctattcctcaaagaactatccgttacctcttacttactcaatgactcaggcagaaagacagtaagaaaaggattcaatagctacctgatcgttcttaactggctcaaggtacaatatctattcaacttaagaaattggccgtgcagaaaatgtggcttaagtacggctgttttccacaccctatggtcgtaagtgcttgaaatagcatcaaaaggatttatatagacatcattacctgtagaatgtagatgtggtgggtgagagtcgggtgagagtcgggaatcctgcgggccggcgtgcgtctacgaggcgggcttggcgttttgctgttaaatttcaaacgcaaaggcgctttgatcggacttgatgtgagccagggagctttacgaatagtaggtcttggcagataaacaacaaggcagatggctgccttcgacctaatccaatatccattacgacaattgagctggtcgtaagttgtaacgaatgggaaaggaaatgatgaaataacggaatttataagcaagcggagcgggccgcccggtcagcccggtcaccccataacataagtaaatgcaacaaaccgaatcaaatttccactatggagtactatagcttagtttcaattataaatttgatgtagttcaatataggattctacagcattaccttaaaatccatgagtgtctgctaagatcaattgacggtcgttgtttacccctaaacaggacggcggtgaggatcttgggccctgtaagcacatacctgcctttaattaactacggagtcattatccctacaacatatgaggtttacggatcggcgatggtgtaatcggggctagactcagagcaaacaccagtggccacatcgattcccgcatgcagtagggcgccccgccctccacgccctttgacatttgttatataaaattatactccgtacaaaatacttaaagagatgccacagtcttgataacctgtaattgccagacttccgtggtctctttactggagcgtttagcagccaacaccaatatctcagcccgagtgaatgggtcgcccgaactcggcggaggaatatggtcgtgatgcccctccagacagcccaattacccttgatgagaaggaagatcctaagagatggccgaaaagcagaaaatgtgagagacctcttcgattttgaatctctaccaaagtaataatatatgggttaactgacgattatggctatatgattagggctctatacggtgattgtggcgctgatggctggagtaattgccttttgttcgagtatctatacagcaggaaccaaccttattactgtcacctatggatgttcgcagacagtggctactctaggagtgaccacctttctactagggtttgcatcggggcctctcatctttgctcccctgtcggaattatagtcagtctatgttgagatactcctgccttcagccgcttataccagtattaatctagcggtcgcaaccccatattccggctgacgctgggattgtttgtcctcttccaaattggttgcgcattagccccaaacatagccgcgctgataatctttcgattcttagccggctttttcggttctccgacggtcacaaactcgggcgcgtctatcacagacctctggccgcaaagcgaacgatcagtacctttagctctgttctccgccggtagcttccttgggcctgtttttgccccggtagctggcgggttcgtctcggaatacctttcctggagatggaacttctggttggtgcttattctaagcggagttgtctacgccacatgcgtgctcttccttccagagacgtacgcagccaagcttttgcgggataaggcccggcgcctgggagtcgtccagtccgggccctccctccaagagcagctcgggacctgccttatccgtccctggctgatgcttttcgcggagccgatcttattcctcctctctctctacatggccttcatttacggcattctctacctcgacttcacggcgtatccgattgtatataaacagtcccgcggctggtctcctggtattgcaggcctatcctttctcggaatgggtaccggcatggccattgccacgattgcctctccctatgtaaacacgattcacggaaaatacgtatccaaacttggtcctgtcccagaagccagactaccccaccttgtgatcttgtcttggctgatccctgtcagcctgttctggttcggctggaccgccctgcctccggcgcattggattgtagcaatcatttcgggggttccgtttgggttcagcctgatattacttttccttagcatcacatcttacctcacggactgctatggtccgtatggcgcgagtgcgcttgcggcaaatgcagtcttccgctcagtctttggagcggtatttcctctctttggaacgtatctgtacgacggacttggcgtgccgtggggatcgagcctgctaggtttctttgcactagcatttgctcccctcccgtgggtgttttatcattttgggccccggattcgaatgaagagcaagtatcatagaatgatgattggtgatggggcatagggtttcaatccacttctttctgatttcctctctgattatattgcaaattcatattagccaacagcggggtttctgaatgtacaggggaagaagaagaagaagaagtctataaacatacttctttatgtatgaagatattagaaatttttacaatttacttttgacactttcaaatatttattttgcaagagatattgatgagaattcactacagtggagatcccaaatggagaatcaatgttcactgtaactagatctcgatcgtttgtaggaatcaaaccttctacatatctctctcaccgcttcaagatatattccatctgatagaattaggtagcaatctttaaaattaccaaccactacttttcttaaagagattgaaaatctacaatgtcactattacatactatgattaattataaaactcaatttcttaaaatttcttaatattaataaaaaaatagatgataaaagtagtattcaaacctaaacagtgctaaataacagtaatttattaagatgacttagcagttttatacgtctaaattgagaaaggtcaacttttttaatgcaaatgagggccctcagagtgcccgctctcaaaatgtttttaatgaggtctacgtctccgtggcctacctaaggtcacctgaccatccaacatattgacggccacactccatcgtcacttccattcatcatcaattctattgattttctttcgttctcagagttcttaactcttcccctctcacacgaaaatggataaacaaacccagaccaggcgttgcgatgaagttaagcgactctacaagctacttaagagttgtgaatcttggtttctttcccccggtgatctccaaggcctcggaatctatagccagcaagttggcatgacaggtgacggctctgtacaatttggtccatgtttctttcggccttatccggaaaaggtgcttcaaaaatatccactcgatacggtttcgatggctgcggaccatcctccacagactcttcaacggcttaataacccccgggacttccagactctgttacgagaagtccagaatgaccctaaggtcgaacatcccctggaattcgctaaatcaagatgggatacattgacacttttatatgggccggatgcctgggaagatcatgccagacagacacgttggcatattcaatcccagcagatgcttcctcggagagggctttcccgggactctactctcagcgatctaagatctatctacgaacggaggttagtgcactttgctttttctcttttactctactgtttttagggactcaatatactaggacgaaatggaagcatagcgctcctgaactatgtggacttaatagaaggaactattggcgtatactaagtctccgagaagtttttcagccaagctttaacccacatgcaattatggaacttttatccgatgttcccgcaaatcatgcagagaattgccttactctccaagaagtaagcgctgttgtaaccgtgatggttgctcgaacatccgatcggccgttccgggaccacccgatccatccagttagtatcttacatacacttcctagctactagagatttcctaagcactcacttatttttttatagttattggttctttcatacactggacagaatcatggaagaataattcaagcttcattacatggagaaagcttgcttttgcaatattctcagctatggagttttgcggatgacgaaacggcaccagttgaactcttcattcgttatgatatgagccagccagttccgatagcctgaagagccgaatcctattattggctctcttgtcggccctgttacgtctatgagcttgaattagctatttaatacagaccctaccacaaagtattttacccacccgcatttttaccccaccatcacaaaatatatgtgaaggaacgaagccaaattgattcaatactgactaagtcgacatgctgtttacaaaaaaagcttggagaagggaaggaatgaagcaagcgagacaataataaggatgacgggcaaggcggtggcagaacggaagcgtgcggagactagaaagtgccttttgaaatttgacgcccatcgcccaccattatgcaaaattaatgcaaaaattaccctattaggctattttatgtacataaccagatcttggcagtaccaattttgccaagagtgtccgcatatgtcttggcgacgctaaaagtgtctccactttaacgggcgttgtcacagtctaaccactgcaacaagtcagttctcatgaactgactttgttatgaccttttggtctaatgggtaaacgttggagcagtggccgacggatctcataagtgcacctaaaatcaatagctagctttaactacgaaacaccggcttgataggtatagataatagataagcgttgcttatataaaagctcaccttttactctacgtaaagagctattttctgtgcctaagagagatataggggtggtgtaggaagaagaaaaaaagtgagtggtggttagcgtgatttcaaagtggggccaatcttaagtctctccctctaccttcttcgctgccttcttctgttcttcttctgttcttcttccttaacagcatcagcccatctataaccgttgttctcgaggtacccggtggagaatacatatttaacacccatcgaagacggaagggaggcgtcaacgtggccgctagcgaccctcctatctccgaggcagcatcatcaccatgattagacgtaggggacactattatgagattagcatattgcaattatgatctagactttgagttctgatttcatgtattcagactggttcaatgaagatcgaagacctttcagtgacaacgcaaaccgagtctgagtttaggtctacgctacatcgcccctgccattagtcgatgagcaaagcttaaatagaagcttgccttgaccaaagctaggtattatgtacgcatttttgttgccaagttatattcaatcaatctactggggaagagtgatttgtatgaacatcaagcaagaggactcactgttgggatcttcttcgacgacagtctttgttggctattgggttggtgtcagtgtccttgtcatcgtcgttcttggtagattgccctttagtagtattagtacaatctttgacgactgaagaacctagattaagagaactcacctgtgggccttttatgtcatcacttcttgcgaactcgtttcagcccctttttcgcactggtttgctttttacgatcatgcttccgcttgatcctggcagtttgctacatgaataagggtgtgtcagtaattacctggtcacttgctatgagacacgagtagcgtgcggcagcggcacggtatatctttttatatctataagtagcactaccaattttagggctatacgaacttgaagatatatgtttgaaaccttaagatcttttgcttaggatccacatttaatattttacgtagtactccttatctttaagtacagccctataacgtctcgttatactcaaaaccaacctgtctatcttcgacaatagcaatagcatccaacaacccgggcctacgcatttatatagtagcaacagaacaatgtttgtggcagtctcattcaatgaagtttcgattaaactatcgtctattggtcctaaagttgcaggataatttctgtatagatcaatacgacctcatctggtgcctcaataagacctgtttctctacctaggtaggtaggtacctagccctggaggtttgtgctgctttgtcagctcaaaacaacctttggtttcgttaatggaaaggcaagatttctcatctttctcccacaaacactcatcggaaaaagcagatttcaagtaaccatggaaccccctccaacaccccgccctccagcaccgaaggtgccctcgaccgtcagtcaatggagagccagcgcgcgcgattgccacgtcctgaccaaaaatccaagcaagctcgagtgtctgcacccaggttcaaagctcacgttcaaggaatatctcagcatgaggattattcggagggtctccaatatcaccgagttccccgaccgagaaactgaaggtagagccaaggagatggtcaagggggactaagcaatacagacgtggctctcatatatcgaaacggaccagtacccaaccgaccgaaagcttggcatgttcgccctagtgagaccaggtcagcttgcgatagtagcttcggattcccaggaaccttcccagacagttgaacttcggcgtcgagatcgacctcaagctcctgaactatcagcagataccgcgggacgcagtcctagtgctgccgcttcaactgcgccaactgaaccgtctactgccgcttcaagtgtgccaacggaactgtctactgcagcctcgaggaagtgggtcaagtacgccagagcggatggagaaccgcaggtgaaccaattcgtgataacgctttgacactcagcgtaggccagagcgtgaactgccaatggtcccctaatggtaatctgttcggtagcgtgtcttttggagaagtccaattaaccgcatatgtcgacggataccttatgggagtcaagaaaagcgatatttttgctattgtggaggtaaaggcaggaatccgggaccccgagcaatatccgttggtcgagtggcaagaaggcgcagaaatggtcagctggatcatgaatgatgaggagaatctgcgacatcatccattcgaaacgtgggtggagtgtgaatattcgcatattttcgtgctaagtgctgtaggcgcctcttgatctctttgaatcgacatgagatgtatttgacactcgcccgctaccacgaggactacgtaaagttcctaaagggagaatttcaagggttgaagagctaccccgagaatagattcctccacttgcacgagtacggcccatgggatatcggcaagaaatctcacatgagggacctggccgaaatcatcgtaggtttctctctccgtgtcaaagatgaacaggctagatcggctgtgccatcagggagtggtcctgacggggcgtgagcacaatgtgagcgatagacatgtctctagcgtgtccggtgcagtatcattccattacaacggtttctcgaaatcttttctctctctttcttcctttcttcccctatacctgttgtctcacatagaggcactctaaatctttgatcaaaagtgggtttccacatcgggccaataccacctgtccttttgtctcctttcatcaccattcttacctccacagctctcactgatacacgtcaagactcgccccgaaccgaaccggcttgctggccctacgccctcgaccccacctgccgctccgctcgcctggctgagagagatccgatctacaatagatccgagccctacgatcatggtaaaaaccatcacatcttagtcgcctataacgctaactactaggaacttaatcttaacccgctctatctgatctcggtaaccctataggtaggctgcgccaaaacccacgaaacccaaaacccaagccaatctatgggcgcctattagacctattaaatcgtaaaaacgtgacgttcagatgatgattttatttcatatatacattgaacttcttttcaatgataggcccagtcactatcatcctatcttgttcgcttacgagctctcactgacgtgcgtaagccggtgcttctaggatcggattccggaagtggggcatcagcctcagcattagaaatcccagtttgttcgtgactccgggcccaaagttgggctttacggaagcctaggccggcccgtaggcgggcactgtcgtagtctacctacccattgagacccattgaaattagacctagataaagcctataggcgacggttctgaccgcgctcagaaattgtagtgcttacagaaaggtataagctatataatttcacacctcatcattttcttagaggccatacgagtgaataacttccctgaggacaggggctatcaacaaaaaaggctgatcaatgttaggtggattcttagttgttgaggttagtatcacagaatagatggctaacaaatgatgcacatgtcacgttgttaaattgttccatctctgcctttattttcaggccgtagagtgagcaagtctttgcgctcattaagcgctgtcgcatacccttgagtacactgagtaatcaccctgtgctgtgaaatactcagtgaacaggaccctgagccccctcataaggcggcggcaccccgatcgggaaattcgcatccgcggcctaaaatccggtacatacagctacatatgtaggtgtcccgcagatccataaaccccggtgagtagattcgatcagtcttagatatgattctgttgggccatgatgcgtgcgacacctgggcagtcgggtccgctttggttagggtttgggttcgacccccccccccccccccccccccccccccccccccccccnnnnnnnnnnnnnnnnnnnnnnnnnnnnnnnnnnnnnnnnnnnnnnnnnnnnnnnnnnnnnnnnnnnnnnnnnnnnnnnnnnnnnnnnnnnnnnnnnnnnnnnnnnnnnnnnnnnnnnnnnnnnnnnnnnnnnnnnnnnnnnnnnnnnnnnnnnnnnnnnnnnnnnnnnnnnnnnnnnnnnnnnnnnnnnnnnnnnnnnnnnnnnnnnnnnnnnnnnnnnnnnnnnnnnnnnnnnnnnnnnnnnnnnnnnnnnnnnnnnnnnnnnnnnnnnnnnnnnnnnnnnnnnnnnnnnnnnnnnnnnnnnnnnnnnnnnnnnnnnnnnnnnnnnnnnnnnnnnnnnnnnnnnnnnnnnnnnnnnnnnnnnnnnnnnnnnnnnnnnnnnnnnnnnnnnnnnnnnnnnnnnnnnnnnnnnnnnnnnnnnnnnnnnnnnnnnnnnnncgggggggtcgggtccgctggaggtacggagaagatcggtggggtataaagggggttgtgcccaatgaggtctgaggtaaagtaaactttcatatttttgggaacgaagggatgatcaacgccaggttcggcgtttgagacattaggtgtctcaactccacaaaatcaccatgtgacgcgacaaagatcagcaaggttttcaaactgggtccggggtccggggtactaccgttgctgcacagtatctggggtaggtaattactttggggtaactactttgctgcagggcttgaaaatatattgcgtctatatatgtgaaaagagcttatttttgattgaaaggagtttgagtaaactaaatatccagggtacatctgtattgtttcccattggcctttcactaaatatccgtccctcgcgtcccattttacttggctgatgaacccgcctttcaaaacgcctgtacgcacgcgcaattctgcaaactaggtctaccaggtagagctgtgatcaatccgacttcttctgaagttgcgatagtcccgggacatggctagagagatcacccacgggaagccgcagagggaaatcgacggattcaagcaacaaagaaaagagtaaataccatccaccgaggcatgctgcgaatagcacagctcctccgccctgaaatgagatcgattgcgtcagtaacgagaaaattaaagataccgctaggggactcactatttggaacttcccagcaagtactgtctcctgcatagccaagtaccagtaggcagcattgatgaggccaactccaataaccacggtgaaaaggatatagacaaggacaaaattggtccggaaggagcagatcaagtaaaagaagcatagaagattgaaacaaactatgaaaaatcctgtataccatttgatcgttagaatcttgttcacgctttgctcaaaaagcaaggtcggaagaatgcggtggttgactaaccaaagctggcattgaaaccctccgatgtgagtcctgcagtgggatcatcagggtttggtgaataggctgcgtaggcattgtagaagggctgtagggtcgtggcgagggtgaggtagaagcatgctgcatcattgatgttattagtatttgacatatatttggaaaggccacgagcacagtatcacttaccaaaggacatgaacaccacggatgagaaggtgttaccgattatacactctagcaatccaccaacaagcaagagaatgcctccgaagaagatgtatgctccactgaaagaatagcgagttagcatgcgcccctgaatatggaatcagactgattccaattactcacatatgagcaattccattgttgccagctcctctccagcccatgagggaaaaagagagaggagtcaaggccatgacgaatcctgtgatggctctacgctggtgtcagtcatttcctagaaggggtgatcggaacacagctgccatacataggggttggattgccaatgatactccgaaggtttccagcaacttgaggtttcggattcaagtaaagcttctcaaagagttccggagatagcatgatgcttcctctagacctggtcctctcaaaggcactagagtctccattttccgcatgctgaacgtcgttggcaaagttcacgccctcggaagtgctcgaatcagatgttttagccatgtttggtaagatataatggtgaaaataggggtgttggcaaagatagaattaaaagcagcttcaaacacatggacacttcctaagcaatatataccgtggtaattactagctacataccaggatctaatgggaccaaactttccttgcctgtttggattctggggtaccggaaacgtcctgcgagcagctcacagcagaaaaagcttccactagtgagtctagacgggattccaaatgttgtagatctacatcgcccccgcgttgaagcagagcggcagcagatagtttgtgggggtgggcgtaagctatcgattcggatatacggagaaggagaagcagctcctgcgaatcaacatgcgaatagcttccgccatcgcgaaccccgcattccagcccctattcatggtcggaggagcggatgcgctctgcaagacccctagaacctggagtagtggagtgcggtggagccgatgatgcggggccccgtaaaaaggcgaagctggggttacagccaccttgccgccttggaatttgactggtcattcctcccatcctacattcccaacccaagtcggaaccgctccccacgtcgagaaactcccaccttcgcgaaacgatcaagatgtgtgcctcagcggttccaaacaagttcaccgaataccaagatagcacgctcacctgagcaagtggattggattaattaggtgcccccgaaaaagttataaatcccctcaactatccttctttctcgatactcataccatccgaagagaacaatacatcctcttcaaaacttcttgcctttattataaattttcccttatcggtctttccacaatggccagcgcagacatccagcagaatatcccctcgcacatccgtggagtgcccggctcagtcaacataccagtagcaagcttcccagttccctccaagtgtgccacatgtgaaccagaacacgttgcatcgacacttgttgaggctttcaaccttgccttggccaaacgtgacttcaacggcatcgccaacttattcggagacaatggcttctggcgcgaccatctagctctgacctggcagcttcgaacagtgcaaggccacgaagcgatcgtgaaattccttgagagatcttccgagtccagggacggcctgcgactcaagaaaatctctattgacagaagcacccccgttcgcgccccgaaagtgtggtcacttgatggagctggcgaagttcaaggtatccaatttttcttcaaggcagagacatcccatggctctgcgaccggaatcgcccgcctcgcgctgcagaaccacacgtggaaaatattcaccttgttcactggtcttcaagagctcaagggccatgaggagcttcttggacgtcggaggcccaagggcgcagagcacggtggtaacccggatcgcaagaattgggccgaaaaaagagccgactctgctgcttacactgacggtcgcgagccaagtgtgctgattatcggtaagtttctatcttttcatcattttgaagaacccagctaatccttatttcaaaggcggcggacagggcggtttgaccgcagctgcgagattaaagatgctcggagtggactccctcatcatcgataaaaacgagtccgtcggggataactggcgactccgataccgtcagcttgtcctgcacgatcccgtgtggtacgatcacatgccctacatggagttcccagcgacttggcctatcttcaccccgaaggataagctggctgaattcttcgagtgctacgtcaaaatgctcgaactcaatgtttggaccacaaccactatcaccaattgcgaatggaatgagaagactgccaactggaccgtgaccctttctcgcaaacagaaggacggtaccactgaagagagagtgttccacccgcgccatatcatccaagcgaccggtcattccggaaagatgaagatgcctgaagtccccggcgtggacggcttccagggtgaccttctttgtcactcctcgcaattcccaggtgccaagagaaacagccaaggcaaaaaggctatcgttgtgggctcatgcaattccgcccacgatattgcacaagattatcaagagagaggctacgatatcactatggtccagagatccacaacctgcattatctcctcaactgccatcacaaagatcggtctgaagggcctttacgaagaggatggtcccgcattggcagatgccgatctccttctccatggcactcccacaccagttatgaaagcgcttcagatccatatcacttcccaagaagcagagcatgataaggagcttctcgaggggcttgaaaaggcaggattcaaggttgatcgtggtccaaatggcggcggactcttcgtcaaatatttccagcgcggtggcggctactatatcgacgtcggagcctcccaaatgatcgtggatggcaagatcaaggtgaagcaaggccaggagattgctgaaattctgcctcgaggcctcaaatttgccgatggcactgagctcgaagccgatgagattatcttcgctactggatacgacaatatgcgctcgcaaacaaggacgatgctgggcgacaaggtcgctgataaggtgtctgatgtttggggctacaataacgaaggagaaattaggaccatgtggcagaatagtgggcacccaggattctacttccatggaggcaatctggcgactgcaagatactattctaagattctggcactccagatcaaggctcttgaggaaggtatctataaccatggtgaattctaagcggacgggtacggatatattgtttcaacatcatctacaatttgtttttcctccaatgcttgttctctaactatatcaaattcatttatcaactccaagattgacttttccaatatttgaatgtatcagtactccgtacagcagggtgtaataccttgggcagcggggcagcgaaaccgaatcgccggtgcatctcggttctcgtactaggtgggtcaggacaatgagatgaatccacacccgtgcaaaggcatacgtatgtttttgcctaacatggaacgaagcattgcccataagaaatgatcaacgagcaaataaccacttctggccctgaagacttccatgatctgcatagtttgttgggatatccgattaaccagccacaatattgggaaaatagaacccaacaaccatacgagatcctgaaggatccacttgtatgggtcttcctgggcaaatattttccccatattggttgtctgtctactgtatcatgtgagattggtttgctgaatttctagcagactgctatatccatgcatactacgagctacaaacccaattcaggtctactacccatatcactcaaatgaagaccatgaaagtatcgaacgacgccaggaacaggtctctgcatctgtggttggacggggaacagacggaccccattgctttgcaggagaacagtggatctattagacctgtatcctccgatctgctcggagttgccgcctgaagggtccacgagtatgtatgaagtttcaatatccgtatcgttttgtttcctgaatctccttataatggacatctgctctcgcagcaaaagtcgctcgcaattgaacaccctggaggacgcggccagctacgcacacgctacgtaaccatctaaacctgtctgttcgctcacattcactcccctaatattcggcatactaactaaaagtcttcgttgaagttcaattgaacgctagctatgcctttcgaaactcaggagccctggaaaagacagttctacagtggtaccgaatgtcccgagcatgtagtcattccattgaaggactacaatgcgtaccgcctcaatccggtgcaccgatgggtgtacaataagctggaaatcgcagagaagcagggactggcgtgtgcaccacatggaatagctcctgagaaattccctgtcttcagcaagccgatttacaacatcaggaatcttggagcgggaaccagaattcttgaagacatggaagactaccgtgagcactgctcgtcgggacatatgtggtcagagcttcttgaaggtgaccacatcagcactgacgtggcggttctcaatggcaaagtagtctggctatcccacacgctgggcattccctctggcggcggcaccttcgacagatgggaagtcaatatcgctgtaccacagcaggacgagcgaacactcgtggattttatagagctacacttgccagactacacaggcatgctcaacgccgagatgattggtggaaagattatcgagatgcacctgcgcttcaccaaccaatggcccgacctctatccgcgcgggtttttggatgccgtggttgggttgtatcaagggaaatggtgtccaactgccgagatggcggtcaatgacactcgaggattcagcgttgtcttgtttggtaccccgaaatcagagtcgtgggtgaagcccgagatgtcgctagttgaggccctccgctctcgccactctttgtacagcgtgcagatgcccttcactgagggcattccggctcgtcaccactctcaccctccagggggttatcagcttgcaactttcaatgggcccgatctaattcagtgcctgaaggcgcgggaggacttcaagaagttatttagtgctgttaacagttggtctagcatcacagcaagccacgtctaggtctattccatagagtgccacttggatgcatcagcacatagcgtctgagaaaatatgttgtcgcaatacgtcacatctctacgattaagcctctgtaatctgaatcccgctgtccatttctagccaatggatttcaataatcaattttgaccaacccaatggccacgatgcgttcctctcacgccgttgattcttggagtcagaattttcatgatctactatagatcgctatcacatgcttcatgtttgcttgcttgctcatttgcagaaactccagcgataaaagcaagccatctcctacttctgtacttgcttattctttccgtctctatcttactcccatcttactctcatcttactctttctccacatcaacatccacgtcatcaacctacagcgtccacccggcaccatcgaaccggcaccgtccatctcccattttcgacatcgacaccgattccccaccatccatctccgcatccaatcctacgtacttgcttatggactatgggttccctctctgatatgtcgtcaggcagtctgggtcctcccgtatcggaagcgcaatttgatgcctacacagctgcccggcagaagatgttcgctaggctgcataactatcaatcgctgaatgacgatgacgatacggtccacttcctggggtcatcttactctcattctgaattgaattcactctttcttcaagggataaacctggcatgtcacaagaataataccagtgtcacctccgacctcgccgagtttgtacagtcttttgaatgggaaaaagtactcttcttcctggccttacagaatcaagtgtcgaggcagcaacaattccctaataataatgtagcttctagttagttagtgactgttcattactaactattactaactatgactcataatgcgaattgacatgtagttagttaaaggtcaatcgatttatcaccaaacactacgtgaagaagaatcatgtcgagagcaaccatgtccacaatcactctgcacagcttcgctgcctccccgtttggcgaaaaggtgcgccttatcctaggcttgaaaggtttggtatggcagtcagtggatgcggaactcattctaccaaagcctggcctcacagccttgacaggaggatatcgaaaaactccagtcctgcagatcggcgccgacatttactgcgattctcggctcatcgcggaagagttggaaacgcgatatcccattcccaccatctttcctggcaactccaaaggactgtgcttggcgttgtctagttggagtgacagagacttgcatattgctagctctggacttgtcatcggagtcaacaaatcaaaattcccacctgatttaatggccgatcgagagaagtttttcgaaggtttcatggacttgcaccgtcttgaagaggatgtgcctcacctcaagactcaattacgcgcacatgcaagtttgattgaggaacagcttagtgacagccgttcgttctggctgggtgaagcgccgagtcttgctgatttccatgcttacgttgacatttggacggcacgcgtttacttggattttgcacaagaactgttcaaaaatttccacaagatgtctctatgggaagagagagtacggaagattggccacggaagcaaccgggtcattgatattgcggaagcacacgagtcggctcgttgcagcacacctcttcccggtcacggcgtagattccgaggatgcacttggactttcgcgtggggatgatgtgatagttacgccagacgactacggacagggacataccactgggcgcctagtgactttgacaacgcgagaggttgcccttgtgcgtgatgatcctcttgtaggacaggtggtcgtacacttccctcgtattgggtttcgcatctcccgttcttcgaaaccctagctagggagcccttcatttatattagatctgtacttctccacacataagcacgatggaaagaggcaaagggaggtctgtcaacctgcattcaggcagccaaagtcttaatgcatcactattgtttacatatctccagtcttttatgttgtgctatttggaggctttggaaaaatcccggaacgatattcatatgagagatgtcaaagaaaaggcaactcaaaagacagctagacagatgtcgtatctttcatactagtacagatctagatctagattcatgtcatacaactcatttcatatagctcatgccatctcaatctgctcatcttcggcacccttcttcgtgactgtcacatcatcagagggaataacatatgtcgcccactgacgagcaggaaccttgtcctgaaagagtctctcgatttccgcattgctgcgacctgcagtctcaccaacacagaaccacgaatatgctagcaaagacgtggttgttgctccgtagacaaaaccgatcatcggacctaaatgacccgtgtagtacatataggggctggtgaagaccataacccagagcgtgaggaagaagacgcccatggcgcacgcggtgatcttgtttctgttgcggccaacggacatttccgatgcaatagtgtacgagagggtcccgatggagaagttgtagaagatgatgttgatgtaggcgagaacaacgatgccgatgccgatgccacggctgaaggttccatcggatgctttggtggtgccgaggccgccgacggcaattagggagatgaacataccccctgagcagacgaggaggttcgtgcggcggttgatcttgtttccgagaacgactgctaggccgacggtaatgatttgtaggacatagatgatggtgttgatggtgaaaggatctgaaacaccgatggactgggcgaacacaacgccataggtgtaccagaattgaataccattaatctgctgcacgaacatgacgccacaggcgtagaagagcttgcggcgctcaatgggatccatgatgagtgagacccaggtagcgtccttggccatttcacgctccatctgaacttggtcttcgatagcttgtatgtccgctgagggatcatagtcgcggcagctgtggttgattcggcggagagctttgatggctttctcacgcttgcctttgtacatgtaccacactggactctcaggtgtgaaaggaaggcacagaagcaagataccgggaagaacaaccagcaggcacatgggaatgcgataagattgagaactggaaatgctctgggtgccttggttgacacaggctccgactaactgcgagatagactgcatgaactggaagcacatgagggccggacctctgatggcagacggcgccacctctccaatgtacatcaggcaagtagcggtgaactgtccaatacctagaccaatcaacacacgactgacatagaagactgagtcagagccaaatgagcacacttgcacgatggctccaacaatgatacaaagagaagccgacaggaatacagcacgcctgccgaagaagtcattgatgggagcggcgccaatagctccaactaactctccgacatagatgatgctagcagacaccgagaggaacgatgtcccaagagagtatgacccatctgcatttctctccccgtagtccttggcaaaccatgtcataccctgaatcccagtatagtagatcgtatcgtaaccgtagcagagagcaccgatggcagccaccatacagtaagcgatggcccgccgattcgacttccagtcgatcttgagatcaagacctgccatgttcgaagatctacgtttttgaggtaaaaaacagtaaactcaatagacttagaagcccacagaggaaaaagagaatttcagaagaatcgaaccaaccggtttgcaggggaacgatcgtatatatacctttttttatagaggaaaagttcaattattgccagaccaaaccaagaacccggaggcccgcatgtcggggtaaactccatggggtatgcgggccatagccgagtattttcgaagtctccatctaataggacccctggggccccccttccccccggctgatatgtagaccaagacatattttatagtgtgggtctccgcgttattcacgcactcacaggagctttttacatgaagagttttaccccagacactttgaagaaagaggcagcttcactatttgtagatgtcttcgagcaaagatctcatgttggaagagggcagatcgggctataagccgacaagatagcagcagaatttcggcaagtggtcgccgccaagcggaatcccgaaacggggatgtcgccgaaatttgacgataatttcgccatgcggccagtcaaagtttcaagatttcaaaaaactaccgcggcacaagcctttgtcgaggaaactggagtaatcggggtaatcggtaaccttgaaagagaagggctaccgacaatctttatctagcgatataatccgctagactaatttaggtaagtctgccgctggccgcaattctagaggagcttatgaagattaatatggtactcttgatacatatcacatgacctggagccagttgaaaattgcggccagcggcaggtgtacctaaattagtttagcggggactgtgaagattgtcggtagctcttccctttcgggatttctaggcgggtctttccatactccaacatccggggtggactatagattcgcttgcaatagccataaaaccatttctatcggattataccgggtcagagaaactgtgattttatctttatattggctctatcggcaacactccggtatttctttggccaaggtttcgtgagtcaagattttagcacgagaggactaccgaaacttggccaaacgacaaatcgggaataacacggctcagctagaatcccgtgaatccaatagtgcaaattcgggaaagagaggcattcaatgtagccgataactaacaaggatgtactgctactctcataattagcctctaaataaaacatgatagcaagcccatcatgcaaagaatttcgaagtcagaggaagcacacaatagaaactagaaggggcccttttcacatgcatctcagctaccttcgttaacgtatcacgtagggcttgtcacgattggcacttgcgaaactcgtactttcccgttcgggattgtaccgttggtcgttccttcctgttcgagggaactcgtttgcgcagacagtcgtaccttccttctgggataaacgaggatagggctttgcccccgaaggggtataaagaccccattgttgtttaacgtttgttttcttttctttccttctacatacttgatattcgatgagcaatgcacttcttttgttagaaagaacctggcacgtcacagggcttggccaattgtattcagatgcatggtacccaaccccaactccaagtatgaaaagataataaggggatatatccacatcaggaatggatggaataagtcaatgaatgtctagaccgaaagatctgcgtaagggagccaacttcatctacagtcaatttgtgcggcggtgtttatttgtcagtgagaatctacttcataccccatatgacgtgacatattccaacgtatgaacctatagccattgccgttaaggccaacgcatcaagagtgtcgagtgaataccaagccctcaaatgtttcagcgggaatatcaaactccttccgttctaagtccgactaagtgcctgcgcgtggcaccccagaagacctccacttgccaagaataaaacctggttagtctggacgtgtagcttcttctgcgagttacattaactagcgagaaaatcggtgtcggcataggaattactcgattcggaacctatacggggtttgatatggagttgagccttgccctcacaacgactctacatgtatatcttccaatggacaggggttaatgctcagcatttactattgtcgaataaaattgtaagaaagacctgtactcaaagctgccatgcctgttgcagacctaggttatgtgggccgaatacagcagatgactccgagtgccagtgtacttagaaacccaatgattgttggcattctgcaaaacaattagtaggtttacaatctagacatagccatatcctaagcatggtgtttgagaaggaaaaggcttaaagaatgagagttgttagacaaaagagcctgtgtccttctctttaggccgttcttaaaaaccgaagttcgacggttgatagatctaactgaattagcagaagccctaggggtccactactgctaactgttcaagaattgctgcgaaggaaaatatgatgctggagacaaaaatggaaaaaaggggtattttactcagccaccctccgtattcaaaatgagccgaatgactccaaaaagtttagaggagacatccatattcccgaatcaagagaaaatgcggttgggacattagactatgaacaattcccataattcaagcagcaccagaggacactgagaatcattagtgttgctcgacaccaatattcctttctatatacacgtctcagtcaatgacacttttctcgtcagcccagctaggctgaatagaccggcaaacagcctcataatcctggaagcgctgggtatcctccaccagcccaggcgttgtccagaacatagcccagttactatcagccagcttccaagtacccgaagaccgctcgaagtaccatttattaaccgggttgtccatgcgactacgccagcagactccattggggaaacatgtgcgcaccatcgcgttgaacacaatgtcggcgacaccccccgcgccttggctgcgcttgagcacggcgaatttatccaaatagggcaccatgcgcgcggcactggcttcgcttccgtcgtctggtacgcccggcggcgtttcccaggtcaggattgcgccgccttcgtactcaccggcgacgatgataccggcgatacggctgttcactcggtcgaggtagttttggacgttgagtttgcggtcaaaggagtcttcgattagggtgactagacgggggagatcaatagaagggtcgttcaatcccagtcgcggttggatctgggctgtccaggggtgtgtgtaggggtttgggaggattgtgagaggcattccacgtttcacaaaggtcgtgtgggagctaactgggttaaatgggctggatccgccattggaagcaccgcgtcgacctgggggtagggaggatgatagtagaggcttgtcggtgaggaggtggtggattaatgggttgcgctgtcgacgggttccaaccgctgacgggtctgaagcggcctcttttggtgaacgcgctgagtaagaaacttcttgtggggaggtaatgatgcctgaagaggcggacggtagcatggctaatgcttgttgggttaatctgagattctccaaatggccatctagcacctcctccatcgcctcggcagctggtgattgagcgggtgcggtaggtggcataggcgagacaacctcgcgattgacgaattttgagaacgggttactctccaagactgggtaagtggcttccgtagttacctgtttcgagggatctttgtggccagaaatagagtttcgtgcctgggaaagctcatcttcaatttgatcaaactcttgctccatgttgatgaagacgtgcgatgattgagggcccttgaaagctgggatgcccccaagcgcatcgagaacaatgacacggtccagagagacctccctttgtagagtattgattctctcggcagttactgctggatcttcgtccgggtctggatttgttgacagtcccgcaaattctttcgtcagtgcaagggtagcatcatcagctgaaactgtcacggctcgtgggttttcctccgtataggcaatgggcggaacaagtacgacatggccatcccgaaggacgctcaagagcatttttcgcgacaacaccgtgggttgaccagatccccgctcggatatagataacgccgagtctagtctgaaagattttgagtccggctgctcatcgattgggcccgatatccgatttgcctgttcaatggatatttgtcgcccggcagggccgcccatcttcccggggtcgacaactacacagcatgccatgcccaggcggacgagctgcgagagggtcttcgccactcccttaatgacagaatcatcgagcaattgtggagtggtgattttgatcagggccaagtgcagcctttcaggtataacctgcgcgcgcggagtaggagttgtatcttgccggaagacagggctatcgtacaccgccctagaagcaccgtagaatgagcccaaattgacaccggagggcagagatcctggtatcggctccttcggaggctcggtagattcttggctcgatttggcggggctggcctttagccgagctaagtacgacctagcttcacgcttagtcgatgcggagctcaggaggctaagaaagaattcctaagccgaacatgccgctgttagcatatgaacagaaagaaaagaagaatagtaatatgccacctacccgatcaagcaatttctcctttgcgcggtggccgaggcgatcttggctttcgctgctacccgagaactcggcgaattgctgggctcggacattcagcgcctgtgccggtcgcgccgtaatggggtcactaggacgaacgagatgttgctgcagacttctagtcaataaatgcttagcattggcggggtataccggttttaattaccttcaccagtgaggacttggccgttcgagaccagttgaacgttcgggaggtcattgttgggtgtatatagttgacgccaatgcaagagcatcggagaaacaacctcaccacaaatcaacagtaaacatataatataggggaacgagtcaagatcaaacaaatctttctgagggaaaagaaaataatatgacgcatcctcggctaggtatagctcaccgcctgtggataccgagattgataagaaaggctgtccacttctgtccacttcagggctataaattgtacatgtctgttctgtacactccatacaaggatattagtggactaggacttaacggaaatagactgcgttttaaatgcagctacctatcctggtacagagtgtataagaaaatctacccactttcgagaaatatataatcaaccataacagctggtggttataaatagcaaaatgatgttacatgttgtacatacagtccaacccttcttaggtttaggtctcttcaagcataaaataaacacaaagatcaaagaaaggaattgaacttttttatactgcctaacaataaatttagaaagaaatacaacctattcgaatcacccacgtcattttcgggaccaaaatgctcgctgatttcgtatagtacttttgatatagctagcactagagtccaccggtgtactatccactcctctatgacctacatataccctaaagggaaccttggaagtatagtcagggtcaagggttctagaagccagtagcccgttttatacgtgtagaccgctttgggcaaaatgtaacagtacgagggggatacatcgtaatctatggcgaatccggcctggaacggggtactgaaaggttcctatactttagcggttgaacctcccccgccactgcaaaagttgctcatcctcgtcatctaaaaaaaagaatacctgcttgaaacacgcctctgaaccaccgaagactcatcaaatattgtcaaatatcaaatccaagtaagtgcgcccgctcctctctcctccccctcttcaaatccaaccccggtcgcaacacccctccttgcaatacagcgcaaatccctatgaattgcccaacatcccctaaggattgctcggaatcactaggaacaatagctgtcaatttactgtggtaattggcactgtctgtttcgactattggtcctatttacctgcttgagattgatccccaccattttagatttacagccctcgtacgccaccacgccgcttacccttcctgcaatccaattgatcgtggcaccctagcctggtctcaccgtcggaaattttgatcccaaccgcctcgaccctcgataccccagtcaagttctttatcctcactatgtccgatcagagcgaatacctctccgactccatgtccggccaggacaacgggctcaggccgttgtctaatgcggacgacttgtctctcggaaaccctaacagcgatttggctcgtatcatgagccgtgctggcattcaattagccaatggatttccagtcgatgacgacgaggacgacgacgaggacgagctggatgaggactattctgccgttgatcaggatgacgacgcaaacgatttcccatactggttccgccgcccaccctcccacaaccgcacaaagctggatgagctgcatccttttgttcaattgctctccatatctaatgtggaagattgtgtgaaagtggaggaagctttccccgagcaggagcgttgctctcccgataaggtatggctacccggattcaattacaccatagagcatcaattcaacattcaaatcatctcacttgatatgaattgatgcgacttcagacggatggagacttcattgctaataatttcatagttccgctaccgtctcagcagatgccccgagctcagcctgggcctcttcactcttcctttgctcgcagaaggagaaacaaaacctcgcccaacgctcgtcggacacatcattgccactcgcacttcagagcccattgtgacagatcggtcgatgcaacttccgaccaactggaaaaacgagcgttggtccattgaggacggacaagctgttggtcacgaagaaggcggtcgcactattgccattcattcgcttgctgtggacccaaagcatcagggcaagcaggtcggaagcacattgatgaagtcatatatccaccgtattagagaggcccagattgctgatcgcatcgcgatcattgtacacgatcacctgatccccttctacgagtcatttggcttcgagtcccatggccctagcaagtgccagttcggtgggggtaattgggtcgatatggtatgttctctttttaactgtcagcaaatatatactgaccctaaatagatcttggagtttggccccgagcctcttgaggagtaggaagtttttcgtgtcgttttttttaaccctctttatttaccctcttctttttctatcttttcggcttggggcatgttaaccactgacgggttcaacccgttcttattacacacatccatgtttttgtctcatctcaagggtttatcctagacgggctttcacaagaaaagcaacggagtttctttgggcgggattacttttatgaatctgggcagaaacggcttgggcttcccgaatcggtcacaagggcatgtgtaccatagttgacgacaatgctattatgaggatgattgtttgattccggccagagatagttatcaacttccaaatatcctatatataaatcctcgaggcatgaaatcgagccctcgatcattttgttccatattgtatcacgtgactcggctatatcccggttcgtccaatcctggtccccgcatttgccttccgcccggcagaaaaaaaggactgccaacaattttttcatggagaaaaacccactctatcaacacccattcactcacggcattacttcaagagtcattatttaatttgactcctgacttgtgcccattatgaagacgacgtggaaggatgtgagtcaatttcccgactgcccttttgcgctagatttgactgagcagagtgctaatgtatttttcaccgcttggtagattgcgcctgtgccgacacaccaggaattcttggatattgtcttgagtcgcactcagagacagcttcccacacagattcgtgctggtttcaagatcagccgtatcagaggtatgatcacattcttttcatctgatccaacatcggcaaaaaaaagttatcgcggttatcgataaagcacaatttctgatcgaattttctttccatcagggttctacaccagaaaggtcaaatatacacaggagactttcggtgaaaagttccagcacatcctcgatggatttcctcgtctgcaggatatccatcctttccgtaagttttactcctatggcgattatggttgctcgggtggggtctaatatccaccagacaaggatttgatgaacactctttatgatgccgaccacttccgtatcgcccttggtcaagtctcgaccgccaagcacctgattgaaaccgtttctcgcgattacgtccgtctcatcaagtatgcacagtctttgttccagtgcaagcagctcaagcgcgctgcactcggtcgcatggcaaccatcacccgccgtctgaaggaccctctcgtctacctggagcaggtccgccagcacttgggtcgtctgccctcgatcgaccccaacactcgtactcttttgatctgtggataccccaacgtcggaaagtcaagcttcctgcgcaatattacccgcgcagacgttgatgttcagccctacgctttcactactaagagtttgttcgttggccatttcgattacaaatacctccgtttccaggccattgatacccccggaattctggaccaccctctggaggagatgaacaccattgaaatgcaatcgatcaccgctgttgctcacttgcggtccgctatcctctacttcatggatctttccgagcagtgtggatattccgtcggcgatcagatcaagcttttccacagcatcaagcccttgtttgccaacaaaattgtgtttattgtcgttaacaagattgatgtgcgtcgtcccgaggacctggagcctgagtaccaggagcagctgcaagagatcctcaaggcagaggatgtcgagatgctgcaggtttcctgcaccaccaccgaaggtgtcaccgccgtcaagaacgctgcctgcgacaagctccttgctgagcgagtctcccagaagctcaagtccggctccaccgctgccacccccggcagccgtctcggcgacgttttgtcccgtatccacgtggctcagcccatgggtggtctgcgtgagaccttcattcccgaggccgtcaaggacctcaagaagtacgacaagaacgaccccaaccgccggagactggaacgcgatatcgaagaggagaacggcggtgccggtgtctacaacttcgacatgcagcgcgactacactcttggcaacgatgagtggaaccacgataagattcccgaggtgtggaagggcaagaacatctacgactttgtggatccggatatcgagagcaagctcgccgccctcgaggaggaagaggagaagctcgaggccgatggctattacgagtccgacgagagcgtggaagacgtcgaagacgccgacaaccgcttgaaggccgatctcatccgcgagaagcgcgtgctgatgcgcaacgaagccaagatgcgcaagtcgctgaagaaccgcgccgccatcccccgcagcgcaaagtccaagaagctgtccgagatgaccagggggctggactccgctggctacgacaatgccgcagctgggtctcgtgcccgtgccgccaaccagcctcgcggccgtgcgtctgtccgtgagcctactgcggaccccgatgccatggacgtcgacgacaacccacacaaggcccttgctcgcgctaagagccgtgcccgcagcacacctgcaactgatcgtcgtctcgacggtgtcaccaccttcaccaaccgtgataaggctgagcgtatggccaagttgggccagaagaagatgaaccgtatggctcgtgctggtgaggctgatcgtcacacaaccgcctctcttgacaagcacttggtatgtttttctatactatcctttttttcgggtttatttgctaactattctctcttcagtacgccggaaagcgtggtatgggcaagacagatcgtcgttagaagccccgctgatgccgatgcggcttcaacgagacccattcttaatcattgtccattggtttcgatgccgggtgcaaaatggtgttgggcgtttaatatttcaaattttttttcccctccgagtttcgtccaaatgttcatttgacgcgcatttttggtttccacgactgtttactgtggatgatttatgtttatttgacacagtaatgatttgtgggagttcgttctcctggtcaataggacgaaaaagttctataacttgatgatcttgcatataccgccaatacagatgatctttggtttcatgtggtacaacacttagactccaatcctagtgtctacatttttaatcagcctttctcgtacggacttataccccaatgtgtaactaagatcacccttgggtagagacagttcgccggtgcttagctagttacatagagcagctggttacgtcctcagaagcattggtccctaggtgcattaaccggtgggctgaaaggctgaaaggctgaaaggttattaatagcaatgttcaccaatcatacgattcttcctatggttgtgatcatttgataaggtagcctagcatttatgtagcacaacttagaaagaaaaataatgttaaggaaagcccgaaagtagtgaaggcacagttgaatcaaactttaagcatgcaacaagcataatgcttattagagggttaatatccattgacatatggggcccccactcttctaggtctagatacatagcatgatagctcgggtgacttttgcaagttgcaagttctctgacaatatcatggtagaacagaacagagcagatcctatgtagtatatggcgaggttaacagcccacccttggatgtccgcaactaaccgagcaccgggttataaacaatgacggcatcggacatgtgctaaactgaacaagatgccttcctgtcataaaggatcggagataagcattgtcgcctgtgcaatggggtagttgcttttcatggggagaggcgggggtggcttatttgggttgtatggcatgctatacagaagtacaacatatacggaatactccgttatagttatattgtatatagtgtagacgtcattatggttgtgtctcagaagattagacaaggctgaccaatatttgttcattgaacttgatttatccaaatgttcctaatatggcatggggtaaagatctactgtcaggcaaactctaaatccttgccctaggttgttaaatcaaacagcattaggtataatatactcagtaagatgatttgttgtgtttagataaagaccccagaatacttcaactcactatatgttcattatgccacgtataacatacacaaagcctgcggggctggtcaggtttgccccggaaatcggtccaatctagggttacatgcgaaaaagtcagctcacacagacataaggctggattgagtttatttcctagtcggagactaactaaaggaggtttagggtgtccacaaagtttttttctgttttcacaatggcctgataccggtcagagtttttttctaggggattttcattttaggtctaggccgaacaagggatgccgcgaaagacgatgacgaacataccgaaaggcgaatatcatagggaaaacggaatcatgctacggactacggagtactccgtagggctttaagtattgtattcatgaagatccatgaagtatctataatgttccaatccatatatatggtacatatcttttggtacacggtacatgtgtgttttcggctatgccgactcgggattccactcggctcggcagagaaaggacattcggtgtgccgattgagaagaagtggatacaagatcaacacagcggaaacatctcataggagtcggctcggccgaagccttaacggtagtggttttataggtagtcttttccgtgcccagcttggatttcgtcttattagcatgtttcgattcactaggatttgttcagggatacataagtaatgggactatctatctttgtgtgtagagcatctttgtttttcgtttgactttcctaattgagctatcaaatgcaatcagatattctagagctctcaattttaactatgatcagcgcccctatgcccggctagggagcagagtctacgtattatgacccactcgtaccttggtattactatttctttcttgtttgtttttttcggttttcgccttctcttttagggaatctatccggtttcagtcgcctttgtttccgtctatctatcatgccagcacagtttctaatctatccataccccggtcgtagaccctgtgaacacggcactagaacccgaggtgaaggcgaccacctggacatatacgtcactctaatagaagtgagttattatttttacattgtcgccaggaactagaaccagaaccagaagtatcatggtcactcttacgtatcgatatctggcactcggcctaggcaccgcattctcattcgcgcatttgcaccgaggacccagtatacctgactgaatcccgtatgtttctagaaggtggtgagaaggtcgggtgatcttttagtttttatgctcacacgttactgtttattgtttgatgtaagtgtttacattgtatggcctgtctgttccaaggttgcatagcctctgactatatcatgaatgcaatcaatttttagaacaaagtcatacaacatctacatgaatacgttttcagctcacgtgcattccaggtaccctaacattcccccgtcctccaccttctccaccataagaaaaaagaggaacctaaacccggagtatatggcgctagacattgaaaaggccaagaccttttagacccatggagtaaaattcataaccttataaaccccatttcacccatctcatgttcaaaaaactcattggacagtacaaactaagatccgcgcgcccccgtcttttgccggtcatagtactctacacatacggagtacccacggtaaccccaagggaaagggccacccccaagacttcccccagaaactatttagtgcctcctcttcctttctcttcgcctttttcctcttcagcttctttctatcatccccgtctgtctgttcatcatgggtgtctctaccttcatggataagatcaagcatggaaaggccgaatcccaggtctcctcccaggccagtcctgctcgtgccgactcgaccactgctgagaaggacaacctcaccctcgatgatagccccgtcaagtacctgacctggcggtctttcatcctcggtctgtgtgtctccatgggtggtttcattttcggatattctactggtaagtgtcacacagccctcaccactgtggatgcaacgttaataatagccgaacctcaggtcaaatctcgggtttcacgaccatgatcgatttcaaacagcgcttcgccgagtacaatgccgccactggagaatatgctttcagtaacgttcgcaacggtctgatcgtcggcctggtacgttcgagatgtcaatggattcccgcatgcaagtcttactcatactaactctatactagctctctatcggaactatgattggtgccctggtagctgctcccattgcagaccgcattggccgcaagtactccatctccttctgggccctcgtccacatcgtcggtatcattgtgcagattgccaccattgataaatggtaccaaatcgctcttggccgttgggttgctggtctaggtgtcggtgcgctttccagtgtcgtccccatgtaccagtctgagtctgcccctcgccaggtccgtggtgcgatggtcagtgctttccagctgttcgttgccttcggtatcttcatctcctacattgtcaacttcggcaccgagaccctcaagagcgacgcctcatggcgcatcaccatgggcattggcttcgcctggcccttgattcttgccatcggtaccctcttcttgcctgagtctcctcgttacgcctatggccacggtcgtgtcgaagaggcccgcgatgttatgtgcaagctctacggtgtcccccacaaccaccgtgtcgttgcccaggagatggccgatatgaagctaaagcatgaggaggagcttgcccacggcaaggctcactggcaagaggtcttcactggtccccgcatgatgcaccgtatcttgctcggtgttggtctgcagtctctgcaacagttgaccggtgccaacttcatcttctactatggaaccagtatcttccagggtattggtctgagcaactcttacgtcacctccatcattctcggtgccgtcaacttcggtatgaccctgcccggtctgtacatcgtcgaacactatggtcgccgcaagtgtctgatgtacggtgcggcttggatgtttgtctgtttcatgatctgggcctccgtcggccacgagatcctggtccaaaccccctcctcccaccccgccggtgttgccatgattgtcttcacctgcttcttcattgtgggcttcgccaccacctggggtcctatcgtttgggctatctgtggtgaaatgtaccccttcaagtaccgcgccgtctgcatgggtattgctaccgctgccaactggacctggaatttcttgatctccttcttcaccccgttcatctccaacactatcgacttccgctatggctacgtcttcgccgcctgctgcttcttagcggttatcgttgtcttccttttcgtcaatgagacccagggccggactctcgaagaggtcgacaccatgtacatcctccacgtcaagccctggaagtccgctggctgggttccccccgagggcatcgttgccgacctgcacggaccttctaccgaggcccccaaggacggtgaggccggtactagtgagcaccagcatcacgacggcgagcctcaggaggttgctgagaaataatgcgataatggctgaaatgatagcgtgtatcgcgcggcgcttgcgtggatgctttttcacaaaattctgtgttcatacttaactctactccgggatcatttgagtctccaccatattcctagggagaccatgatttaatagctacaagccaggcttgttttagcaatctcattttcttatcaaattaattcaaatcagctgtaagacacgcaactagatctaattctcacattaacttcattgattcccgaattccatcccagctccctttctagccgccccgtaaacagcagcaacatctcccttgtcccccctaacctccttaacgacctctagaagcccatccataacctcgacgtttttcatcctcagtcctccctccttcgcaatcccataagcatgtctcagatccttcctagcaagatcaactgcaaagagcggctcgtcccgggtacaataatccccgcccaccatcctctgcgcataattagcaaacgggcccggcgcaaaaagcccaagccattcttgcagcggctcaactcccagcccagacgcctcagcggcaacaagggcctcagcaagaacaccaaccgtattgagaatgaacgtgttaccgagtaatttcagcgtcgacgcccgtccaacatctatatcacctcccctcccagacgaaagatcaatcgtcttcttagacacgacaccgtcgaaaaacggtcgcactttctcaattgccgcacgcttcccagccggaacgacgataagctgtcccgcatctgccatattcggtgccccgaagaccggacacgcgacgaaccccgctccccgctcattgaaggcggcctcggtttgtcgcgatgtatccgggtgcacggtcgagcaatcgatgaagatcttgtcggacaggtcttgcgggattgtagggtccgataggattgccgtgacgattgagtccagggcggcgtcgtcgccgacgcaggtgaagatcaggtcggattggtttactgcttccgggagggtagttacggctttggcgtttgggagtttcgaggcgtgggcggttgctcgtgcggttgtgcggttgtagaggaggagggggccggtttggggtcctttttcggcgatgttttggctcatgccctgcgattgcggattagatgaggttgctttttggttgcggtgcggattggcttactcggccgatgttgccgagacctatccatgcgactcgaggccctgccattattgcgtagtaggtatagatggatgtgtatagaaagactgtaagtgtaagagtgttcggggtgttcggggaagtatcggggccttatacgggtgggatgtggggtgtggggtaaagtggctcatggctcagttcttagccgattgtcgggcgacaatatatacgaagtatccagtaggctaaagggttgattgcatggtaattcgccatggcttgcctgtacttattcctccatgttcgaatactgcattcgcttttcaagggttcagttgtgacatacaaaaacgtgtaatgtggccaagagctgccctagaaaaacagattgagaaaagcatatagaattagagaaaaatcgatacgactcgatattcgcaaaacataatatccaacctaaagcctcgacttctcagcaatcgcaatatcctgaaacggcaacccgagatacatccacatgaaggcaaacctatatcaatcagcatcccatacatcgcataaagaccatataaaacctaccgatcactaccaaaaaacggctccccttttccttcggaatttcgcacccaaaaccacggggcgccataagcccccttatcaagagcaatctgcgtattagccgtcaaagcctgcttgatctccgggcttgatgccgcagccagaatctccctgacttccgaatcagagtacccattgctctggagtagctcggttaggttttctggcttgctgatgtcgatacccttgtagtacatccactcccacagcgacaggaaggttgtttcgtacttctcgcgtgggaagtggttttttatgtagatcatgcatcgttggggctggctggttagtggctgagaacatttcgaagatatagagaggattatataccaggattgacaggattgggaagaactctggtgtttggatctgcggaactccaaagtatttacatgctcgctccgagtcgaatttggaatacgttgctttggcggggagtgaccaggggggtttattccctattcaaagtgtcagtaaccctggtctgaatattaatcacgaatgaaattctcgatctatactgcgtacctgagccaacattgatcccgcctagaaagaccgggtggaatctgttccatcaacacacatacatccaatgtattaactagggatttgcatactcaacctcaaccccatgtgactctagaaccttacggttccttcgtagataaagcgtcgcatagtatgagtatggcgatactgtccaagcggcaataaacaattaggaatgaaatctcagggggtggagctgaaggcgtaccgcagtcaatgtaggcatcaatcttgccagacatgagtaattatagtcgatatgtttctattcaatctcagtataatcaatcaggctaccaacgaagaggagttgattatagcgtggaggtcggggccgaggtggagatggaccgaggctgcccgacgatgatgaggtgatcatcttatttcccaaattgtcatgaatcgtcaagttctatattgaattaaatccaagatatataattgccatatagattttattcttttctcaagatactgagattggggccgccccaatcaccattgcgttggtttggtggattttcagctcttcctttgactgctcgacagccaaaagcaaacgcgtggagcgaatgtgaagttctatcaagtcaatacaggatcctctcaattggaccatgaactgaccttgcaaaataacctcatatccatcccaagagtgatcatcccgatcatcttcatgtatgagcactggaaaagatggatcccacgcctttggccgcacgcgcattttcaacccaacggtcttgctcatatccacccacagtatatcgtcagaagacattcgctctttttcaaagccaccttccccgtcggtctcggtagttttcttcgttctcctactttggccacgcaaccactctctccataaccgaataataccatcctcaatagtcgatgcactcaacagcaacgacgttcctggcttgacttgcactagattgaccaccacacataactgtgagaaattctcatatccacctaaagtgatctcacgtatcactgcatcctctgccttgtcttctcgacctccatatcagcccatgtaaaccccaccatatccaacagcagaagcacctacctgtggaaaaaccggacttcgaaccatttatgcttcgttctttttcttctttatcgctgcttacctctgggcgaaagcgcgagtatagccccgtcactctgcctggctggtgggtggcatcatgaccctcgctcagtccattcgtaccaaggtattgacagaagacgtggggctcggtgagttttgagctaggatggaagcattccagcagcagtttgaattccttgagtggtatgctaaggagcaggcggtagtgcaggattcttgaaaccagcgcatagaatcggtggttgactgatatgagtgggagaagtgcccgtgttgagaagtcggataggatttggatgaatacctagatatctctttaggaccgtatctcagagtatgttctgtgtacatacttcgttgggcagcgagtccaaggtcatcacgggtttagcggggttcatagtggttgattattgtgtcaattgagatgcaacctgggaagatagaccaatttatgctagttgtatactccaaggtgtaatacaacagaacagagacaacaagtgtatgtgagttgcactattgctgttggtcttgctgtacatcgacatagagacgataagggataagggataagtgacgtcatatcacgggaggcgggcatgaatttccttttccggctttttggtgtgccagtccactacagtccactaccgtccactgctaacccactgctaacccacatacaagcatcctatgtgggacacgacccggggattgtgatcttcacggttagttgcggtaccaaattgcctctttcggctcaatttgggtcaaacagtccccccgaacgtgcctggttccccgaaaactggggggatcccgatttctgtacgggtcaccgaggaaaaatgatgccaaggcgttgtatgctagtatatattgtttctaaaacttcgcgataccattagcacattaggcgagatccacgtgtggcctcctatacacaatacttggcctaacacattcattcctactccggacaccccgcctcctcattagaagtccaaccccgaccctttcaactgttttcgggcatttctctttccttttagtttcttcttctctcccctccaatattcttgttttcaacctacaaccatggacaacgtactcaacgacatctcccaccggagatataaccccctccgtggctcctctatcctggtctccccacaccgaaccaagcgtccctggcagtgagtattgttttcagaaagcgacatttcccaacaaatcagctaatcgtacaacaatccagaggagcacaggagagcccctccaagactaccctacctagttacgaccccaaatgctacctctgtcccgggaatgagcgcgcccagggcgataccaaccccaattatgagagcactttcgtattcgtgaacgactacagcgcagtgaaggaagaacaagcggcctataatccctcaaaccaggatggtacgcccaaccgcccagcgcatccgtaccacacgtatcaagctcacaaaccacagaactcgaatcgcgatttctcaaagccgagcccgtaaccggcaagtgctacgtgctcactttctcatccgcgcacaacctcaccctcgccgacctggcgcctcgagagatcatgcctgtgatcaacgcctggacagagatctacgcagcacacctgtccccggcctcgccgttagcgaagaacgcacccgtaacaacgctaccgcccacatccaccttaacaagcgcgacgaagccaaaggagcagtaccggtacatgcaaatcttcgaaaataagggcgaggcgatggggtgctcgaacccgcacccacatgggcaagtctggacaaccagctcaatgccggaagagcccgccgccgaaatgaatcagatgattaagtaccgccagcaacacggcggtagccacctgctggaggactatgcggcgctggagagccgcaaacaggagcgcgttgtgtttgagaacgaggcatttatagttgtctgtccatggtgggcgacgtggccgtttgagacgatgattatcagtcgcacgcacaaacgcgcactagtggatttgtccgaggccgataagatgctgcttgctgaggcgatcgccgagactacccgtcgctatgataatctcttcgagacgcacttcccttacagtatgggtattcaccaggctccgcttgatggtaccgaggaggagattgagacatcctacctgcacttgcatttctatccgcccctgctacgaagcgctaccgtgcgcaagttcttggttggctatgagcttatggcggagcctcaacgtgatattactcctgagcaagctgctgataagctgcgggcttgcagcggtgagttgtacaggaagaagatcgattcgtgaatgtctctgaattgaaaaagaaaaaaaaatgatgaattctggacgggtcataccagagttaaacctatttcatcctatatctatatgcaaattatattattttacccgccaaggcttttgtgccggatgtaagttatgttatacatagttgtggtccaacttgcaatgctcgttcctgtatagctatcggttccgtgttgcattgcattgaaccatcccctgaagccggatcatcccctcttccaaatcaggcacttaacccaggtacgctccgcgctgggtgaacatccaagccagcgaacccgacgcaacaatcaaaggattcaagaaccggcccttgagcgaggcattgccgaggacgagctcgccaacaaagtgagacagcgcaatgccgtacgtccacatgccaaggttgtacgcgacagggttcgtgatgttgtaagcagcagtcatacgaatgactgcagagaggaaggtccaggttccgaagatgcggccggagagcggagttgcgggaaccgtgccattgctgtagagtagagaggtgtaattcggtgcaatgtaggcttgcaggctgttaagagcggaaacgaccgagacctgtatagagagtggtggttagattgggggaatagaggcatcggtagctaggggttcggagtggcagtggtaatggggactggggtggacacgggtagaacttacgaaaaagagccatttgggcaggaggccctcggactgaggcagataggctaagtattggtccatttctgagcgtgagtttgtctttttgtttggtttgaagggagttggttgtttttcttgtgactcgaggagacgccgaggatgttccgggagtcttggcgtggatattcccaacaagcctcgcattagtttgctcaactttttctttttcttctgtcaactttttgctattcacatatcttcgctcattatggatatctcgaagcatattgaatgcctgtctcaatggccagcccatattgccccgggcttacctacttatggagcgctgtttctcctagcgactggtggactggtcattgcctgcaaggtctggacgttcgtgcgggtgcttctcagcctattcgtgcttccgggtaaaccggtatgaaatttgatattcagatcctgaaattaacgggatgaagctgactaggatgatcaaatagcttcgttcgttcggtccccccggtagctgggccgtggtgacaggcgcctcagacggcctgggcaaggaattcgcgctgcaattggccaagtcgaaattcaacgttgtgctcgtatcccgaacagcctcgaagctggcaaccctgtcagaggatatcagcaagcagttcccgcaggtgcagaccaagacactcgccatggatttctcacgcaacgccgatgccgactaccaggcgctgggcgaacttgtctccgatctggatgtgtccgtgctagtcaacaacgtcggcttgagccattctatccccgttccgttcgcccagacccccgccgcagagatggccgatatcgtgaccatcaactgcaccggcacgctgcgcgtcactcaacttgtcgttccgggcatgatacagcgccgccgcggtcttattctgactatgggctctttcggtggtctcctacctactccgttcctcgccacttactccggtagcaaggctttccttcagcactggtctactgctcttggcggcgagttggccccctacggaattgatgtggagcttgtccaggcctacctgattacctctgccatgtccaagatccgtcgtgcttcagcttctatccctacccctcgtgctttcgttcgctccgttctgtcgaagattggtcgtagtggtggttcgcctacctacgcttatagctcgtcaccatactggagccatggtattatggcctggttcctgacttgtgtttctgggactatgggcaagcttgttctcgggcagaacaagtctatgcacgagagcattcgcaagcgcgctctccgcaaggctgagcgtgagaatgctaagaagagcacttgagttgcttggcttggtttgctcgatttgctgttgttgtggagtataaggagcatactacgagtgatgcttcccttctcgggcgtgattaatttattattcgaaatgcatgatgggttcgacgaagtgtataaacagaaaaatgataatcagcgctcatgtgaaatttattgatacctaacggtcatcgtatcctataccaagaaaatgaaagctaaactccgtccccgatgatatcgtagaattcttatcgataagctcttatcaccccgtggacaatcatccatgacgaccagctagaaactgcgcatgttacaatcaaactaacctgacgcatataagtttatatccagactcatcatgtctcaatcaacccacttcattagtggcatcgaagacgcctcatacaaaaatcccacggaattaaaaacaccgatctgtgacaatcgcattcatctcctccttgccgcaaccggctcagtcgcgactatcaaaatagccaatatcatcagcgccctttccccgcatatccacaagctctcaataagagtaatcctcaccaccaaagccaagcaattcctcgccggccagtccgccgagcagcccaccgcctcgtccctcatttttctccctggcgtggaagccgtgtacgatgatgacgctgagtggggaccagagccctggcgccgaggcgttgatatcttgcacatatctctccgacgctgggcagatatccttgtcattgctcctctttccgcaaacacactagctaagctcgccaacggactaagcgataacctgttgacatcggtatgtcgggcgtgggataccgatggccaggttgacgggaaacgaaagcgaatagtagttgcgccggccatgaatacggctatgtggcggcacccagtgacggcccagcatatcggggtgctagaggaggagtggggggttaataaagacgagggcaggggagaggaaacaggttggttcgaggttcttcacccgcagtcgtcgaaggtcttagcttgtggggatgtggggagtggtgcgatgttggaatggactgagatagtgaaggttattgaagataggttagggttgggggatcagaactcatctcagagtagttaggatatgtctttgccattcctctatattcgcatttatcctccaggtagcatacttccggcgtagcggacattcccaagtcatcttcttggattatttatggcatctattagaatttttccacaccaagaaacctatatcagtaactttctctgacatcctcgataatctatcgtgggtttactccaatgatgttgggcatcagttcttatgcttggatgtatttttctagctcccgatgttcactgtttgccccctatgctcgtttagaatcttgcacaagacttcttgatcactttcccctttcaaatccaattgaacccactgtgtaaatttcacttgtgtcggctttacaatatcgtgaaaagagtggggtcccatctcacaaccaggtgagtgaaccaattctgagagctggaccatatattgaccccaaataggcgattgattggcgagttgtaagagaacatgcaaattggactgtataaggcggttaaagtcgggtatcagaaggtttgattgagattcgtgggagcccaatagataatgaggaagagagctgattaaaacataatcacgatggtgttttccgtcttggtgtcctgcttcctctcgatgtttttggtcccttggttggcttgtgatctcgcccttgctgtctgtataggccttgatcgccgatggtggcggaactgctggcaaccccactagttctgcggtatacacgatgataaacggaagaaaaaagtcactgaatgcatctccggttttagggagctcatatataggtgtgcagatacgtaagcgccgtcgatagtgatactggtaatgcaaagcaagtccacgccattcatcaaagtcatttagacaaggcgcagggttatccgataggagctgcgatggccgacacccattggagcataatgactcgaatgttcttgcttgattgacttcattaatgacaatctcgatattctggctgtctgttagatagacctttgctaacattcttagagctctggataacataccaatggacgaaatccccccccccccaataacagctagcagcgtttactccccagagcgccgaagagattccggcgtctcctaatagttccacaagccttgcaatgtcatctatgcccgggccttgcacggatgtaaggaaatcattctcgagagtcatgatcgggcctttcaaacgtggcaacgtggcaagggggcgccagattgtacgggtgcgaaggtgcagaggtcggattattgaatgagaatgtaatatattgtcgttgaatatttcagactgctttcgacaccgctctatgataatgtaccctaaatgatactagttacatggttacagtcggaccgcaaaagtctccactaggatagaaggatgattacggagtactacggtctgtattgtccctatggttgttggctgacccccctgagtggttatactgtatgctcaatggtaactctatagtatttgaactaggatttttttcaagtacaaaagccacataatagtagtatcaaaatccttcaaaaatgtagtataaaagacaccgaaaaagacatacataatagtaatgaaagagaataaaccaaattgattcagtcagtaacagcacgttctataaaccctgcagttccttcggttgcaaacagatctaaagcaatacatccactatcaatcatgggccatgaccaggtccttttgtcctattacattaccatttgcaaatgcactgaaatgtatcacccgatcggtcattgacacagatacctggatcaaaagctccaagtaatagacggtatgtccggcgatggttcggtgaggaaacgaggcaaagtcaaggtgatcgaagtgacattgaatataatcgatgcaatgggcatctataatgaacttctctcagcattcccaatcactgcttataaagatatgcatatgttttgtggttgaaaacattggacttaccggagttttcaaaccgctctggtgcatctgagagattggactcataaatctccacgggtttggtaagaagatcatgctcccaatgaagtacctggatgctatgggtggactgaaatccctttgggtagttctggtccttttttttggaaacgatctgtcagatcgtacagggtggttgcggacacttggataatacacaccttgcgtaacacccaacaggggagcaaattcaccgatagtgcgctaggcccatatcccaggaattgcggttcattggggtgggagaaactttgaaacgatgcgaggccgtaatttcgccagcacttgtaggtcggaagagagtagccccgaaggccttggactgctgccccacgagcgatagcctcctccctttgatatacatgttagacttctcgctaactttgtagcatccaaaagatattttcgctcacgggttctcaggaataagcacggaaatgccgatgcgattgagggcagatcctaggctttcctgcagataggatgaggcgctgaatccgccaaccaagacaactttttatagaagatgataatgttagtttcataagtaccccacaaagcaaggataaaagagacgctcactttgatgacatgccgtccacacttctcatttgcagcagtgatctgggacagaatcaagtcgaaaatatttctcagaacaggctcgtataggtctcggacatcttcggcttgaagaacaacacgtcctcgtctttggctgggagactgggaattcaagttgaaatcaaagtgccaagactgactcgttgcaccattgaaatgagtcttgatcctttcaaactttttcatggcgcggctccctggtcggatctcgctcagggatagggaatcgaatcccccttcaactctagtggacagtagttcatagaatcgactgtcaatagcagtcccaccacagttagcccctgttgcgtattagtgctcagtccgtgttaattaaatcttgtgtataacttacccataacggtggtgatctgctcaagggagattgtcggatcaacgtctgtgacatagtatgttgtgatatcctaatcacagtgtaagattatgaagtttcaacggtataatcgggtatctcaccactgtaccacctccacagtcacagatcagaattccatcacgaggctaagggttgaatggataagatgtttagctaaacgaaccgaagacaccgagttgagaatttttacttaccttgaaactgacccttttgtcactgaaaacagcaagagctgcagcctctggttccggtatggtccacactcgatgttgaggcctttttccaaagccggctccttggattgcttgacgcatgaggttctgcgtgtcttcggaccagctggccggcgtcgtgaaccagaaatcgatcggcactccacttagacccagttcggcggagatatagctctggatgtgtgtgtagatctgagaaagataatcttgcacagtgtccacagcttccttctggtcaggcagctccagaatctttgaagcagtggcgatcttcaggaatgtatcgtcgaacttgctgctacttggaaagtttgcgtccaatagcagcttcgtccaggcatatgatcgtacatcttgcgtgacctcaaagccccagagaggggctcctccatcctgcatatatgaaattagggatggggttttggcctgaccaataatatctggaggccactgcttgataaaatcgatactgtcaatatctgcttgaccgcctgcatgagttgtaaggacatatgcgatttctatttcccaagagaattcgttagtgaaagaaatgaatggtttgttgaaggaaaatgtatttgcttacctgtgaaggtggtaccgtagtccacacccacaacaagcttgtacccatgcttagcttccatactgccttggaatcaagatggattctatctgtgttgcaagtgagcttggaaggacaggttggattgaaactcgacctagaagacccttagtgttatagatttgatcttccgtggctcattcccgatgggctagttccaacgatttccaacgatttccaaggtgatgtttctgtttcagtcgtcttttcaacatgaccatatgtttcattgcatgcaagcactgaagttgatgttaaacagaaccacctaattacaagattgaaggacatattagttctcttggtcatgtcattgggccgcagtttattctacctcaaagcatctggattagttccagagaagaataaagaaatgtgttgtgctaatctcccatggaggcactctgtagtctagtttcttctcattattcgcccctaatttcatctgacctcagaaactgaggtttctttctctaatgcagaatcccgtaaatattctacttctagaggaaaaggtttcagagaaaaataaagaaaaggtgtgtggttagccttacatagaggtattttggtcttttttgattcgttgcccctaattccatctaacctcaacacatagagtttctttatctctcatgtgggtttagtggatctggacggagtgccgtttccaataatttccaaagaagaataaagaaatatgtgtggcgagtcgcttatgtcggtattcgtgaaattcgaaaactcccggttccaggaagtaacaaagaaatgtgtgcgtggccatgtttctcccaaccagaaataaaatggaacattaccatgctgtctctgaaaattattcctcttcctttcttgtattcctcgcctctctctgattacattacttcttctgccatgggcgccactaagtcgaaacagaagaaacagaaatcccaggtaaagatgtgccccttttgttgctatatgtttggcctaacacactctcaaaggaagatactctatctgtggaacaccagcaaaagaaagcaaagatgtctacctgcagagatcccaagtatgactatccccgttatacacataaggaatacctgcgcgaaattcgtgagatgaaaaacctgatcgaggcaggtatgttgggctggcccgggccaggaaacaaagatgacatgtttcatacgctcacattcaccgtggatgtccaatcatttgtcattgaacacgcgaaagtcaagcctgaggatgtggaccatctctccgacacccagaaacagaccatcatcagccatctcgcgggatactgcgtgcaagagaagtgggaggtccttatggggctccttccagatctggttcgagagaaagtcctcgaggtatttctcgaaactctgatttacaaagacatctttgagaggtttttcgtgaactttttctggtacttcgacgggaaaatgtctccgacagacgaaggagatgaaacgttcactgcacgtctgaagcatctgtatgaccaattctatgccagtatgtatacaacttcccttccgaaagagagatatgtttcgttgaccatgatctttcattgctacagccaacccacttatggcggcactatggagatccgaaacgaaccgccttgcaaactcgacggatatacgcaaggcatcggacacactacttggaacttaccatctagatcgccgccagtcattcatcggtcaatttgtggataatgctctctccagtgagcctatccggtggctacttaaagagacatcaagcacggaggaggcagaccgtcggcacaaggacctttgccgaatttaccatatggcaatggaaagcgcagcagaattgggaaatatacgaggccacattgacttggaaatgctggcgacgttgcctaggaccttcacctccggtgagaggatgcagtcgcatgaatacaatttactacacgaggatagcaaccttctagatggtcaacggatcttgatggttgtttacccagggatagttcgcagatacatttgtgctcttgagaagtatgtcactgagtacagcaccgcagcatacgttgtggttgaggagcaagctcagtaatgatctcgatggaattggcttgtctgtcagtttgctttttttgtattgtttcttgttcaatatactccgcaccctcctcattatcacagtatgcgagttgataaaaatatttcaaaataaaaaagaatggcgccacccggaatcgaaccggggctaacacagatcattgttgtaccacaatgtgtcgtcataccactagaccatggcacctattagatggagatatggttctctttactgtatatgatctttactgtaattacccacaggggtagttgacgacttaagagataaacactatagttgtgcgtgctgtttccgtagcaattggcaatctcacgatacctatactagcttgccaggctaggctagcaggttgacttgcgtaatgtaagtaggttcatggatatattcatggtgtagaaagtaatgtatgcaacacttctgacagagaaatatatatctccaccccttgggaatatactctgctttgctactacgatgtatattcaattatttctacatgctctcatagctggtagaacaaacaatgttatggatcatattgttaggccaggtcaatatagttagtactgacagcatagttgtaagttagcgagtgacatctgtcgtatttcacgttcttgccgaagcacaagtgaatcgtgatccgcgtggcgtaacacgacaacaacctttaattattccatgttagcacaataatttgatcaccaaaaaagtactacggctgagtaaaggccaatcaataaataggtttaaccaaaaaaaaaaaagaaaaccaaaagccagacggggggctcgaacccccaacccccagattagaagtctgatgcgctgccaattgcgccagcccggcttggaatgtggaaagctctcaataatgtgatcgactttgcctcgcgtttcgagcctagttagcctactacattatcgaagagggggccactgcaacggaggcagtaggggtaccaacaagtcctgcctgcgaaacggggtgaaagcaaagtcattcattgggagtagtaggatgttagagagcagaacaccatggagtaactactagaatggaaggttgaagccaacctgaaggtgtcttcgttgctatctttgccttaggggtagttatccatggatcacatggccgcttagtcatcctgctctggaatcccccgctaatcgtgccaggcgcccaaaacacatacggtatacgcccacgcacagtaataactggttgacagccaaggactcctttctagtatcgaaatcctgtctgaatgtcatgaaagacggtccaaatgcgaccctctcggtagccattaaggtcctattcggtttaaactcggaaaacactctatatcgcgaagcgatatactaagctaagctgctcttaccagttcttatgtctcctataataagaataatcttccagcgcctaggctgaggtgtaacgagattatcaatctcctactccacaataatttgcgggacccggaacttctcgactcgaacataagtcggcatctcaaatgctgaataaaaatcttcattctggtgctcgtactcgatagcactcttcgcgcgatttgtaaagtgccttacgatgacatgttttgtgctttctttgtctactccgggcgcgaaagactcccttctttcaactgatctcccactttctgcttcctcttgtgctgccgatttaagtcgagatgcccagcaggagcccatcgagagggtaagtttggcgcaatctagtcccgactccttaagaagtgaaattgttaacaggatcgggattgttcccagaggctggaggcatagcccacggattcagactacaagcagcaacaatccatctgactcggatattcaacatgttctggtcagggattaagagactgtggcttgtcatgggagctggaatgaccgaacgtgctgcctactataccagcgtcgaactccagttgaaagaacatcggacttgatgattcatagaaaactatgtgcaaaattcagtttttgacaagttcaaaggggatgttgatatatcaatcccctatgattattgatttatatatgacccaaaagggtaattttcccattggactggctatcacggtctacgtctaacccctcttcacggcctctttgcgaccccaatcacacaacatggttgcgccccacgccgacggaaatcggggtgtgtgataagccacccaaggtgaagttgcctatttccatacttcgcgaaataggtctcgaaagcgtaggttatcgtcctagaataggccctcatatgggcacgttcgggagattgctgacgaggtagattgtggtgacgctccatccgagacaaggtcgtatgtggtgaccgtagtacctgcaagaccgcagagcaatcgagtatcaaagcaggtcgttctggtattagatgccatggcgaggactgcaagaagcaggattttggaaagtaagatggcttgataacgatgggtgttcagcttaggggaagaaatgaacacaactatgagtgataacatggatggtcatgtgatcatgtgatcatgtggcagctatcactcgctgactttgcccaatctttttttgccatctctaggcatcctgcttcttcctcccttaattgcggagcgaagcgaagcaattaaaaaaaataaccctctcccccccgcctgggaaggggtcccccggaagggcccccggagggaacgcctcgaaaggagatcatgtgaccaggcgctctctctactgggtcgaaaaaaatagaaatccagtcggtgaaaaagtaatcgctgagaaacggcagaatagatccagccggcagaaaaaaaaaaagcaatcatctagtactctgtactctaaccctatccccttaacataagatcctaagatccttaagcagctcaaagatattaaatcaaaggagcatattattagagggggcgactcactctcctatttctgtctagttattaggtggtcaattactacgtccacgggtagccactcatataaaaggtacatataccccatattatgtactcaaccctttggctagttaaaggagaaataagagtatgaatcaagaataaatttatagttgaattgattggctaataaaaaaaatctcggatatcttatatatagaagtgacaaaatctctatagctctaaactattcttgttctggctctctcttttgctccccgtgtatcgtattccaccgacatccatatactccacattagggcgtgccaagctacaacatggctaccgtagtgggtcactcgaatgacgctgatcctggtatgtacctcttttctccgacggcgggggctcgattatttctagactagcaagacgtatcaaataaatctaaagctaaagaaggaacaagaacaaaagcaaagaaaaataaaattccgctcaaaacaaaccggtaagggtaatgttttgattggtgtcagccaggtcattgttcttcggctgtcagattgttgtccgccatccacaggattccgccccacccccatacccacccccatacccacccccatactgtaccctgctaagtttcttctactccactccttcggaccgatctcatgcccggcaccatggtccgtcacatgttttctctgcaatagttagttgatccgctatactaatccgctaccagagtgcttccgcccagaccccatcacctctacccgcacctgagcccgcccggttcaacaataaccctgtctgcttcgccacaatccggtcggtagaacgcaaactgaacattgatgaaccgggccttcgggctaaagttgccttcatgaccagcatccaaactctcgaggaagagacaatggttcggtcgctgcaccctgctctgaagcattgcgattgtgtttcagtagttgagggtggtccggtgaggaaacctctgtggctagtccatgcccgcggcgcccggaatatttacaacacacacgccgctggcagggaaatacatgtcctgccggcacaaactcttccacccgttacacccttgggtctgttgatgcgtcctgtcaatatcaagcgtatcaacccccggtcttttctcgaaccccagaaagtcaacttaattcgcgaagcctttccaggttccatcggagcacaaatactcctcactggttggctattgattttgtttccggagaagaagtcgctagaggcatgctgggataagggtgtcccggacgaggtcggtggtttacgggtcggatacatcatagcatcattccatgcgacagctaacatcgtcgagtccggtcgagcggttagcagtgcgccaggaacccttgctcagcaggcggcactcggcctacgattacggctcccaggtggccaggaggcaatcacgacagtgacgcatgcgtttgtccgtcttgccgattccagaatgtcaaaaataaggaaacgtttcacggagtatatcttgacagcgaaagattacctcaagcggatgacaccaccgccgcggcagacaccacaggctgccattgtccacccgaaacaggttgcgaactcgccagttggtaaacaagtatggttgagcggaacagacacctgtgtatctataatctttcctttggtgtgccagggtacataatgtgaacataactaacctcactagattggcactattacagtaacttacgaccgatgtacgcgccaccgtatgattccatatccctatggatttcaacacgatttgagtttggtcactgggccgaacctcccccagctcacgaatccccccaacaccccccgggtgacagaatggggtccatatgaagcggcgcttcaaggccggccagtttttgtgcaccgctacaatattgcaaccggaagcttatttacttaccaaggccatggagtaacaacacaagcccagcagtgtattatccatgggacccagtacagctgggatgcacgggcgtttggtacagctttgctatggaggactcttcgagacaccgatagcgttcaagggacatcaagcagtgtcctatgcttaggcgaaccacagcacaagacagctagagctcttctcttccagaacttcgaggcacccctaacggcgagtgaaagtgtgcatatcgatgagaacgaggagggccctgtctttaaaggggggtttcttttgcccgaagagatccgtcgctcacatatcattaccgtgggagaaatatatccagaagacttccgtaccccgcagaaaagttctagctcggaggtccctacgcaggaatatggtatgactgtgtaggcatgtttgagaggagagctgttccggtagatagggaaaggtttgctagcggagagtacgaatatgggcggaaggatagagattgacttgcttgaggacatcattatcatcatcatgatcctttacttttccatcggattcaatggtatattccaaagggtatttaaagctatatatgtattactgtcgtttttgcgcaaatctaaaccttgcatgttgatatatctagtgtccgaggtgcccagaaagagaacttcgatgcattaatggaataaatttcgtttagtctcctgggttgaatattgtacctggtctcccccgaatccataggcaaggcatcgagtacaagtagtgcttagctcagctcgatcttcactttctcctgccacgttaattgtgtggctggctgtgataagaaagattcgtattctgggtcttgctttgataggcccgatctctaagttgtttcgttctgtgcgtagctacaggtaaaaatctacttgcggtgaatggcgcatgttgagcatcctaggttggttatcccttgagcatcgcttggtcttgtgtaaaacgtccacaccgcaatttttgagcagcttggtatagatgttacgttatggcttcctgaagcatactgaagtaagaggtgctcttgaaccacagtcgtaaactaatgtagatcacagatgatctgggttagactatgatatttgagggctttcggcgcctttataccttacattcctcatccatacaagtcaagtgggcgccaataatatatttaattagattaagaaactcgagctacctactgtatatagaatatatgtccctgggctcacacccaaaaatttgcggctggatcctttatgtaacagcatacatgcaacaagaattcaggccacgtaattcgaataatgcgcatgatctgttttttttttttttttcgtaaccgaatgcggatctagaaacaagcttccacccaataaaattccctccaaccgaacccccacgcagatgatatccttcacactgctagatctgatacaagcgggatgccaggtgggccgatcattgagatctattgagtagtagtgcatatctaatctatttagaaaccaaactacttggcttccatgtctctcttaggagctgtccctcgatgaaagtagttctagttttcccgcagcttgctcagccagccacggtgttcatataattgcatagcagccactggtatccaactcactctagtgcctcactttgacctttataggcagagagccttcgcacaaagacgaacataatatatagttaatcagattacatgaactaatcgggcaatgaatcaaactccttaactaatgatcttcatcgtacttaccaaccgcggtagccaataccagacatggctagtcagatagcacagggtggcaagttggatcacaaaatattagtcacacttcaccgatctctcatgcgagtctggaccagcccaacctccgttttgcttttcagcatcgacttttcgttctgaaactagattcggatccaggccgacatctcttgagattggtgaattgccacaggcctctaacattgcggtgagtttctgtctgactctgtattatgttttgaaagccggctgtagacaaggtggcaggtgatgggcaatgccagccgtgcatgctctaggacatgagatattgttcgcatagtccgcatgcattcagcatgtagtggtacatcctatcttactgtgctcttttaatgatttattggtagcatttaacacatcatataaacaaatgactaagcgagccttttggctaatataaaagtcacatcggtccctcagcaaaagcatcattgaaacaataattgtcccagcctccgaaccccttgaattactttcattgcagtgtgcctcctcgtttgccaggattccaacaaagactcggaaattaaaatgtacaagcagtggatcacgattcatcttatcaatagcatgcattcgggccacgtgtatgtcaagcatgccatcctggaatagtgagtaaatagtcgctttacagcgcttgtcaaattatattatcatcttctctgacagaatataagtggccgattccaccggaatggagacaggaatgatgagatttcgactgaaatgatcgaccaaacccaagtggctccaggtagttccgtcaatataaactcatgcggtaacccggccgaagcttcgggaacggagggaagcattgagttgtatgacggctataccaggattgccaaagtccattggctctgccacctgggtaaccattccagtgaatttggcatctcagagctgaacgaccattactggatcaagtctggagcatgggacgcggactcggcaattggcttccttgatgttcaagttggaaggaaggactgaagcaatccgcttactcggtcagacaaagggaaaggtatattctctttttcagtgccatctcagctggtatattttgtgttagggctagccactagcgtatcctgaaatggaggtttcgaactagagtggaaatccccaagatggctcatgtaattgagtagactaatcgctaaggttctaatcccatgtgcgcggtgtgtgtataccctggcgcttacttagcgagtacgtcgagccatacaggccaggccagttgtgcaggtgaccctcggggccgtaacactctcccaagtccccaaagctgtcctgtttgcaaaatgtcgctttcttcgtgggtcgatttttggaaatgcgttggtgttcatgctgagagttcttcgccatcatctcaactggaccaaagccctagctctgttgaacgcaacatggaagggtcttcacgtatcgacctaagatatagtgacggaaaaacggtggtaaggcgagtgtatatgtggcagaaaaatctcaataaattctctaactctctaaaactgacaatagtcctaaaacatgacaatctgatggacaacttagtaatcaaaacaaacaaaacaaaagaaagggtgtttttcgggcgaaaaaccagcctgttcctaacgtaaaggaattccaaaaagatgcagcagatgtaatctgatcatccaaggtgtgatcagggtcgccacattctcactctcagtcgattagatgcgtccctgctctctgaggatccagactgggacgacgtgctgcactttccaatcatcgactgaattgaggccatcatgagcgaggccatgtgagctgccattaaagaagatggatcctccgtggtagagttcttcggttcgatggcttttcgggggaccgctataattttcgaaaccggatgcgtttcatccaagcaagatgcaccatttcggagacagaaattgcagacatcatagtccccaccctggcaaagctcacagtggtaaaactcgtccccactgcagatgtttacccggcaaatgtcacagaatttgggcgaggccatttgatggacagtctctggtaccggcaagtcatgatccacctcatccgggtctaatagaccacagatgtgtggttggcttcgctcggaagcttccgagaaggcagtgcgcccaaagcgatcttggaggtgtttattcacattggtgattttcaacaaaatctgagtggcctctaatgcccctgatgctgccactgtcatcagtggagtacgaccatacacggtggctaggttcggattggcaccgttgcaagccaggatatcgatcatatctgtctttcttttcatttgggctggggagggtgacgagccacctcttctaagagaggctaggaagaggggtgtctcgccgagatcgttttgtgtgtccgggtttgcgccgtggcgtaaaaatattctcgcgtaatcctcatttggggcaaaggcggctctggccagacatgtccttccattttcatctttgagatcaatgttttgaccatgagagatgagcagtctcagcatagcctccatatcattcccaactgtctcatcaccgtcaaagtcagacttcccgtcaacctggactgtggacaccacagaaaagatgtcattcttgttgaatgccttttgcttgagattatatgaggatcgcctgactgttaaactgcttttgaccctcttagtgaggaaaggtctgatcaaccaaaagagagaggattggttcaaattgttctcgttgatcagcctggcttctcgcttcaggagcatgtttgcaattgcctcgtaattctgagctacggcccaggaaagagcactttcaccggccttattcgcgaaatttggatttgccccatacttcagcagcagctcaaccatgaaatcgtcaccgttgagagtggagaacaacaaaggtgttcggctgttctgttcaaggcagttgggatttgcgcctgctcgcagcaacaattcaacggctggtgtattcccaagttgcacagcccacaagagcggagtccggcctgtattgtcttcagcttccgtttgacaccctttctgtagaaggagttccacaaggtcattgtgcccttcaatggacgccaaagtcaagctggtttttcccgtttcatcgcgatgatggaggtcaaagcctgcatcgatgagatgatgacacaggttaattcgcccacatcttgaagacacaagcagagcaaaatccccaacacgagttgttgacgtgaggtaagacagcgaatggcgttgaagaactgagataatagccaggtttcccatctccactgccgacaaaaacgctagctttccaacggttccgcgttctccaggcttgatattctgaacatatacctggaggtccgacttataaatgaggtcagctaccttgttgtgtttgaaatcagctgccttgtacaacagaggctccgaagaaggagcgtccatatcatcaagccctagatcaaccaaccgctgggaaagatcagtgcagcccgcacgtacagaccagaccagtggagtcactagaccatctttccaagaacgtctcgccgagcaagaatttttccactttgaatatccctccccatttctccccgaaatatgctcacaaaacaaagcaaagagatcttttgaaagtctcttggacttggaccaagattcttggacttgttggaacttttctgggtccgattccgaccattgactcaccaagtccccgtctccaactgcgtcaaataagatatgagggtatcctaaatcgggagttggattgggatcagccccatttgctataagcaattcaatgatggcggcatattccatgcaagactctttgtcagcacaaaggaatgtagctgcctgaagtaatggcgtctctcttaatttgttcctcgggtccgcgtgagccccaccgttcagtaaaaggtggaccgacgacagagatcctgctctggctgcgaagaaaagcggagtctcttccaactcattcctttgattcggatcacttcctcttgtgattagatcggctgcaagtgagttggatgggcattggacggcataaaagagagctgtgtttccaacaatgttttggctgtcgagcttagcaccttcgctcaacaaaagtcttgatatctggatgcgcctcgcttttatggcaaagaacaacggtgtttcgtttactttgtttgacaaattgacgtcggcaccacgctcaagaagatatctcacaacctcttcatgatcgttccctgcggcactgcacagagggggatcctccagggagccgcttggttggttggggtctgcccctttgagtatgagagcttgaacaattttcagatatccctttgagactgcccggtccaatggagtctcaaggtcccacgtgattgccctcagatttgggtcagcgcctttcatcaacagcgcatttaccaactcttcatcaccactgcgaacggaatatatcaaagggttgccaccagtctgatcctgagcattgacatcaatgtctttgctcagaagcagtctcgctgtgcttttttcacccttgaaaactgctttgatgaaaggcgttcgtccgctcgtatttggcaagtcaggatcagctccatgattgagcaacagttgaaccatctcgtagttcgcatcagacactgctctaaaaaccagctccatgttcttgttagcgtattcgctgatagtgccatcctttggcagaagtaagcgaactgcttctaggtttcccgaagatatagccagctctagcggactatcctctctgaaccaaccacccctgatatgattgtattcaggattggtcccctggtcaaggaggagcttcatgattgagacatgaccctttccagcagcttccttaagtgcccgctgcttctgttcttgtccaacttcggtaccggcggaaccggatagcaaatacctaacatcggcttcatgcccttcaccagcagcttcctccagtgcatcatcttttgaaatcacaccatggctcatttcaggcccgatgagcttgacggtgctctcgtgacctgcccgtgcagcgtaggtcaaaggggtgtcccccttcgagtctttcgcattgacttcagccccgttttgaagtaggatttgaagccattcagtgagaccaaagtatgcgcaaacatgggctgccgttatcctgcatgtactgtacttcaagatgtttgatgaatccaggggtttgccccgcttgattggaggccccttcatgctttgacaagcagcagaaaagcatccgatgctggctaaaaactgaagcgcaacattttttgcatcatcgctatttgaatttcgcgcatggtctccccagtgtttcgtgcaatacatgtacaagggatatcgctcatgccgatccatgtatgattctgggttactgcagcggccgaaggaaaagggctcaaatgacatgtaagtgagacagtttagcgctacttgactctcggggtccttcaaaataccttctgtctgaagaaactcatgtgtggtgtaatgaatgaggcgcacaacatcggttgctcgatcccagactattagtcccgcacacagattatgaagaatatcaatatccagcagaagctcttcatctaggtcagactgcccgctttcagtcactaatgcatgctgcaattcgacggagctgagtgcttgtttgctgtgggcgagccaagacagagccttccttgccaaatcgcgaatttcatttgcctgtcgatcaatgtccgacatcgctcgtacataagtcggggttaaaccgtcctgacctctgggtagagcctcgagggaacgcttgagatggcggatcgttggcatcttcatcaggtactctgtatgaagctgagcaagcagaaacattccgtctgcagcttgaagcaccatggattggatatgttcttcgagatatacttttccggcgacactgaccacaaaaattggcaacttccgattcaagtataggaggatatcggcttcgtgcgcccgaatttccttctgtattgagccaggaaattttgacgaaacattcgtgttgttgaaccgtgaagtcatcagcaaattgattggaatgtccctttggatatcagatagctcagaaagcagtgtttggtggctctcgtaatccgagacataatattcgtccactgcatcaaggacaatgaacacacggttgtactgcctcagacattggcaaagcaccaccaacagctgtttgactgatggacgagagcccgcagtggcatgttctttgtggaggcgtttgatgttgtctgggatgcttctctgcttggcagtgacctgccgtagcagcacctgtagcatattctgaacagcctgttcagattttggctgatagctgcagtagatatatgcaacaacagactttggatcttgcttcgtcagagattgaagatgctcaatgatggtggcagccatgaccgtcttcccagcgcccgggataccagggcagaacaaagtttgaccagcgctttgaagccaattcttcatttcagcggtctcaagaaaccacaggcatgttccgtctattctttgggccagtctatcattctgcacatcgttgaagttgtgtggggatagccagtcaaggatggccatttgatgctcttcaacaacagccgtattgaggacagaaacactttctttgattgatgatacgtcctcactaactacacatgtcggagggtagatcagccacttgaactaccttggcatcacgaccagacaacggacaggcttcgatactgaccagaattcaagattttttgcgcagtatcctctgcttcaacctctttaggcgtcacaaattgcagcagttctttggcacaagccgatgcagctactgcagcgtagttgtgccaggtgtcgttcttgtgggaatctgcatagtcggatattccgcgaataacaaggcagggaaaggcgttcatcaacccagccgcttccatttccaagcaaatggcctgatgtgtttttccaatttcggtccgtgttggtgcgtgcttgacaaccgcactgcctgtagcaatggttccataatgaatcaccgggctggtatcatgtctttcccattcctggcgatctatctcatagtctttgtcgcattccgcacatgttcttccaccaacgtgagggtattcggcgtgaaacagcctatcagaatcttgattcggcctgacccaaccacctttttttctcaacttcgggtatttggtgagtgctttctcaatgaaagatgcaacctgactttcgttcaacatatgctcagtctccagccgggttaaggctgtcctcagagacctcggcggctgattcaacgggtacctggcctggaatgagccgtctccgagcctcctgccgaagtcatagacaacgactccaccattttctttactggaactgacaacaacatctccaagacgcacatcttggacctcatcgagctcgtagtcagggatccctgctccaatgcctaccatcaagccaaaacgaatgccaggaaaggtaaaaagcatgtccttggcaaccgcggcggcggagctggagccaatctcgttctttggcaaacatgtgatgacaacattaaattttcccacggctcccagcaaataaatgttgtcatctgcctgcttcggtggtgtctgtgggccttcgtgctcctcgtccaacatagccttggctgcactcagctcgattgggagcgcacacacccatccgactgtgtatctttcattcggcaagctagtcgacatgatcgtttcaattgtcttgatgagatgtaaatgattttaagatctcagttctaataacaagtacgactcgagaatatgaaatgaggtgccagatatccgggatccaggggcacataaaagagcaaaggtttacggcccaaggcatgcaactcagccgcatctttcccgtacaaagtacggagtatccctatgtaaacctgttttttgcccaagttgcgacacccgggcaaagatcagcacacgctaagaacttggctgcatcagatctgcaaacccgggcgctcgtgccaatcgtgctagggagtacggagtagtagggaccaccttctcagtttcatatttacgcatctgccgccgagtagcaatatgacacagaatagaggataacccgtctagcagtaagacttctgagttgggagaatatatgatcacatcagcttctggtcaccggccatcgagcgacaatcagttttatatcagcaacagttatgtgggcaaggttgattatgtactcaaaagcccatagtcccatatccatccgatatgcagtaactcgcgacacaagcaagccctggacgcggctggtcctcggacggggactgtcccaggaataggaaccgcctcaggacaaccggggtcgcaagaacactcgacggaactcacatgaccaaacatatcccatgatagggttccccagacgcgcccagggccagtgcatggtataaagttttcaggaggtaaccggtaccttgtaacaaacattggaccggtcacgcttcagagcattgctccagaccaacaggacgggagctaacattgtttgcaaattctcttcgtcagagagcagtggatatgctatggagaaatgcctttctttcgactaccgtcggacttcgagtcattatctgttgatgtgcaaggcgatcatgttgctattggattccaaaatggtcaagttttgtgctttgacattgatcgacgtatcctgcagtcagtattagggtacgctctatggacaatcgagcaggccacgtagatacatagaaatccggtaaagataagggtccaggcacgacagtcaggcagattcgctgctaagagtcctgtactgtcagatgccatttttcagcacccacagaccttttgtatatcctttcaagtcctagtcaggatctcgtccgtcgtctttattgtttctctttccaacgttcctaccatcgccaaatgtgactgcacattagagtatgatacaacatatgtattgctatattttatatcatgactaacaatgccgaaaagagctaaagaatcgcacctaacgccaacacgctttgctagaccagttctagaatgggaatcacttccttcccattttcagcctagtcacgaatgttttctacgaataattccgggttccgatccttgtagatgtggtcaaggtcaaacccatctgacagcgttacgtcacagggatcagtggctctagatggcctatcaataagttgccgcccctcaaaaagttggcggccgtaaacaccgtgctagtcatatactaagcgagatcctattaatgtcgtgccacaatcctgctagttgtgaatcgcctagcaaacatgttgatactttggtctggtttaatcatcccctctacagccatctattggaatgccgcagttttcgagttgagagatgatgacgtgggtgctgcggggctctgcgagtaaatcgcaactcgctgaatggatggtgagttgaggggtaatgttaaatgaaattatataaaagggtagttaggcgcagttatttcttatgtgctaagaattgtcatttcgctacttccttgttttcaaaatttataaaccatctatttgtgaatttgctgaagaaaacctattgatcagaatgcctgttatagccatcaactcgtacgtgatgttacaaacagtttcccccctcagaccatattgctcagtgctaatatttccaatattgtaggtacgacgaattcaatcaaatcatcaacagcgggaagcccgttgtaatcgacttctgggcaacatggtgtgggccttgccgaactatatcgcctattttcgagaaaatgtcggagttggcggagttcaacaatctcgaattttacaaagttgatgccgatgaacaagaacgaattgctcaggaggtcggcgtacgttcaatgccaaccttctatttatttaaagacgggtttaagattaaagaacatgttggggccaacccgaatggtttggaagggcttcttcaggtagccgcttctggagcatgaaaaatggaaggcaggattgcccccattgctggaaggcggggaagtagtgaaagatacctatctttagagaattaactctttgttttccgcccataacattttcccatcccataataataataataatgacttatatctaggtgacggaattgtggattcagtgtggccgccctcttgctgcctatagctctttagctaacaaaagcgagctagttccgatgattgtttcggtacaatagttcttagactttagcactcaaaacgaccgccctcatctacataatatcttagattttcgagcagaggggcctagttcgatctgacttactgtaccacagtatgaattttagctatagtatcgcgcaaaaatgaacataaaaaataattcaggtattagtacagctgcaccacacgctaaaagtggtgcagtggttcattaaccataaaaacagtcttagcaaagcctacaaaatgttaactcgttcttggcctagatcttgtcaatatttgactattttggttcactctgtggaggttcagattgtctacctattttaggtggcattccattgtagcgatactgtaatagaactcgtccgtcccttaagggtctatgtccacttggctggaaaataaatcaccatatatcacacagtgtatcgactatgggcccacgccggaattcacatagttgagatgtcgatggtgaggaggtggattactgggaacgtcgaaaataatatctcgcgtggttgacaggcgagggggtagttcgctaatccaaggagttcaaagagatgacctcgagattttaaagggatctacccatagaaatcattattcacgacttacacatatactgtgagggagcatgttcatagcttacataagctctaggtagctacacctagagcgtagacaacatcaataataagcatctttaccaccactaagcattttccataacagattggtagcatatcctgttaaaccagaggtccttctggttaggcacacctttcagctattgaatttcaagtgtccctctcgcccctaggtcgctagtagcgaagggaatcctaagcttcatcacttctatcaaccaagtacccactttcaattagcccaactaattaccttatcattccaatttcaccctacgtcaaacgtagcactaccttatcaagtatttagtcttaacctttgaattccgaccacatcgttaccactagaggcagacaatttttttttaaaaagcctgcgttagtacagtcctagcaaccataggacccgagccctaccttcgattagggtcgcgagtactcgcggtcacaggacccgagccctactttctcttagggtcataagacccacaatacctagttacctgcccaagtcccccacactcttcctaatcaccaatcagggtaatatccgatacctcttactaagagacagctctgtacctatatccttatcaggtaccagcttcttatatactttaataaatacaatagtataagcgaagagctttagaccttagaacttaatcataagatcctctttatcatatatacttataatataccctacctacctaaggaaaacccctacctaatagattagctacttcgcaaagaacttataagggtaataaaagagttctatttactagttataaggatactaacctataagccctaccgctaaatctaagataaggatcgtctattatagttctagctactaaggataagtctaataatactaacgctaatctttctatagtctagagatctcttagttagcctaagcgatctactgagcgagtattcgcgagctagtaatgtaggtatagactatagcctcctacctcttagtactctaagtcttatataggagtcctatctagaagccctagagggactgcagcttatcgccctattaagggaagagttaagtaatatcatcgagtaagctatagtatattcttactaggcctataatatataagcgatagttaataaggttattatagcttactataaggaaatctagggactagtaggctaagatagctaggatactatatatagttctagctattagaagatagataatatcggctactttactctagatctaacgttagatacctatatctatactataaggggaagtatatactatactaatatatatactttcctaaattagctctaggccttagtttccttaaaatctaaagaggttatctaggctaacttacctttatacctttaggaggtagctatataatagtatactgctgagttattagataaagagtattaagacttaagtatatactccctataacttagctagtatattatactcgagagacgctttaagctatatataatagaggcgattgctagagtaatagttcctaccttagtctactcctagtataatatccgcgcgggatatagtattatagaataggcctagaatatacttcgcgatatataagctgtagaaatcactaggactataatactcctatatctagtatagatatatattaagccgatactctaatataatatatataaacccagcctagtaataataatcttacagtttatagtagatctcgatttatattatagttagtagtataagatatcgcaatgtacctaggtatagtagtatctaatatagccttaatactaccctagatactaaggttaggcccccttatataacccttatctagtatacagctatagtattagatacagttacctaagtctaggataccgactccctttctacccctataatataatacctataataactaatactccctagcctatatagaattaagattagaattgtgactaataatagctgtagtagaactaaaggactctatatacacttctactaagtggcccctaggtatagtgtgtaccttatatactataatagtattaatagtagcagctaaataatcgtactaactaggtaggttagcttttactagctaataagctatagaatcaagtaggctactcagctactggatatatagcgcgttaactgcgatagaattatcctatagctatatattaggtcgattaggctgctgctagggaatataggtagttagatactaatcttactaatatagctttctataatagcgactatatatataagcccctaggtatatattatataggcggagaggataccagttatacagaataccttcctaaggaggatctataagtatcctagtaagctccccctttttaggaagagtaggacgactaactatattattctattatagaggacgttataccttctactacttatctatattattataccctatttaaatcgaataataagctatatactcatttaaaggagtatattatataatatatagctactacagttaataactcgatagtggtatactatacgactaatctagcaggtatagaagtagatactatcctagctaacttacctataataaagttagataggccctatattacctaactaggtatagtatataagacttagcgctatatattagcagttattagactaacgatatagtagaagctacttattatatatcttaataccggctatataataataattattaatatagatcttataaagtctctaggtctatccctatagaaatatactctaatactagttataggtattaggtcgtactacctattattagcctttatcttatttaatatattttttagaggattagataatatagtatatatttatattaaagtatacttagtcaataatcttaaagttaaactacttattagtatagatattataggatataaaggtttccgtttagattttaatactaagatagttaagattctatcttatataggtctaacggtacctatctctatatatactaagccctattatactgtatagtaggtagtctatatagtagcttaggttaccattcccctatagtctattatatatatccctatataggtataggcgttattcctagaggactaggattatatatttaagggttattatagctataccgctttctattcctaccttatagcggtaaattttacttaggtctaggctattaataatataggctagtaagtatcccttcgccgttaggattagattaggatattatataaagtagatataccgatagcctatatagttaaactagaagctatagagctagaacactctcctattataactaatattagatatactaacgagggtctatattatatataggataacggcgtttagcttattaacggtattaccctctaggctagcttagagctatcctaggcctagtagcttatagagctccttatatcttataatatctagggtaaatatctaggtattattaatatccctaaggacagataaataactattccccttaagcctagctaggaagtatagcttcctaagtcgaaaatctacctagttagccctaaggattataagataattaacgctgctttttaactattatataactaagggaagataagttatataataggatatatagctacaggtttccctatctttattatatagtgtacgatttaccggcctaggcgtaagcctaagcgtaagggtcgcgctatagtagacctatggctactaaataaggaagtcatatataacgtttatcctattctaactatagataatattttacttctaatatagggcaaaaagtttattactatcttagatatatctaagtttttttattaatagagtatctgatataagtatcgcggtaggatatatattatctcttattaggactaggagatattttatattataatcataggattctataatagtataccctatatctagtaatagatagacctactcctaaaagagtttattaagttctactatacctaccttaatgatcttattactatttctaatacctttaataaatatatcgaatacttaacccttatccttagtattctcgaaaagtatagggtagctttagaacctaaaaaggtatatattacctttctagaggtctcccttttaggctaatagatagatatattagggataataatactagaggataaaattaaagctatcgctagcctagagtttccttagatactatagtagctagagatataccttagtataaccagtaccttatatcagtatattccttactatataaagaaatctaaaccactctagatctataagacagagctcttatatagaagcctagttaagggccgtctgtattaagagtagtctatatatactaagtatatatatctaatagactataaattagtgttatttaatactatataggtagtcttttaagacctttagtagctagtacactaggactgtagttataggctctactttaatattaataccttataggagggtagccacagcgctatggttttctaccttaaatatagctataactatactaatttaaaggcaactcctccttctatagctatagagccagttatatttttaagctatctattaatactagtagagaagtagtactaggtaacagagttagaggtttcctatattatataggttatttataagatctattatataattaaggtagcgctaaaggaccttactccggttatatataccgactatattataacaattaacctcactatatcgctatcctctgtgttactagactatataaacctatacctagtatatactttataatacctatagcagttttatctacttatctactataaagctaataaactaaattatattatagatactcttttgtatctactagctatagataaagtagaactataagaggataataaccttaaggccctatatattcattctatatctaatatagcgctacctagtatagggcctatataggacatccctaataaagtatatactttccttatatcctatatacagctctccgaagaatttaaaggatatatacgaactatatattaagaggatctaaaatagagccttatttttagtaaattctagcgactcgtagaggatcctaacctaattaaaccatatctaccctatactactaacgatagtttactatattctatataaacagatagcgaccactagctatatattcctaatctaattaaaaacaagattttcgagatagcatatagtaaaagataccttagcttctactatacctagtaaaagatataaggctttattatatataaaggagtaaagaacctctgtacttatatcaatcaatacgataagtataagaaaaacactatatactattataagccttacagttcgctctagctaatacttatactacctattcctttttatatacttactattaattttattataggtttactataaataaagaaagggtttaatactatagctatctatatatataaatctacaaaacacattagtttaacgcctaggaagaaaacctagaaagggtataactaggtaactataatactataagatctctagaaaggtaactagggagtccctattatatagatttctaactataataagtgatttatcgaaggcttctagaaaggtctctttactaccttatatataaagctcctatataccgtagtatactatctatctactaatagctaatctaagcggttaaactagactatagaaatctagctttactattagtagaacctatatcaggataccaattaggataaggggctcacgctaatataggtatcgctaaatatatctaaaaatatagctattaataagtcgctatataagttaatatttagtattaacctataaatactatagaacctcctttattaggtatttatcagatcccccctaactacctagtaagacgccgataagtatactaagtactctgtaatagtaataaagtagtagtataataggtagtatatacctattttctttaaaaaaggtaagtatatttacttataccttatctaaggagtagagcctagatatatcctactatcctacagtattatgtaaaaactgatatagtattacattaaatactacgttattaaatatataggataccttatatactagctacagttcctacctaagttagcgggcgcttatccagttatatctttataatatctagagtgtatacctactaaaggggagatatctatagaacctctatcgaccattaatctatatttccctagagatatagattagaccgatattaatactattcttaatatacagtaccgcggctatagtagggatcagtgaaagtaatacctagtttagtagtctaggcttagaaataaatacctagaatagttagataaggataacctcgttagagtagaggagaaagtcctagagtatctctaagatatcctatattatatataggattctattaattaaccataacctagaaggaatctctctatatttatatttatttattatactacccctctatctaccactagtaccctattcgtttactcttttattatcttatttctatttctactacttcgctagtatctactaccttacttatcttttagttccttaactattttaattatctagtacctctcagttttcttccttctatatcccttagcttactatttaatatactacttattgtcctacccttatcttattaatatacctatctagagatctattagttataggcgttatccttaagctttatagggatatacttatacctattatactatagtaagtgccctaaataagaacgctatagtatctaaccctactaatactaaggataactctctacctactactaagtataatactagcttactagcagataatattatagataatagtaacctaggcttacttaaggaagcgcttatcctacctaaagatagatagactatagataatctaaggctaagattatctcctatactaagaactaatattatacaatatactttatataccgaataaactttcgtgcttatactctactacttctataataagtctaccctatatacactatattaggatagggcgaatatattatacctaatcgatagctaatataatagtaagagacctagccctttattagataggaagattaatatacctactatagcgatatggtttatcttctactttttaatttataactattaggataaccttaaatataaagcctatcttaccttatcttacgtttaactgatagataagggcgtcttctactacctatatataataatactatactagagaaattcctacttttagacagactttaaccaatatagggatatttatacctcgcgtatacctctagaccccctaatgattatataggctaatagattaccctagttcctagtttataaagtattttatatcctctataggaactagagccctatatcatatcttataggaaggaagtaccgctctaagactacagagttttatattagtatagtactagccctacctactactgtcctagccagccttaaagattctctactataactaactctctagacatttaattcagcgacttacctagatcctaaggatataaatggttcccttaacctcacttatatcgccactatcagctatagctaaaataagaccccttaccgcttttatataaaccaggaccctaaggggtatatattagtctactaattgaaggctaaggaggacttagcgttctactagctctaagatctaactagttatcataagtatatctataatataacccacaactttccttctatatcctttcctaaagccaagctatataatatagcttagtaggttattcctaaagctatatttgacgatagctttacctataggaagccctttctaggcgttaacatacccgtgtaagataccggcactctatagctagtcctatagacagtaatatatagtattattaactctttcaggaataaaaatatccgctaatataagcgcgtataccgagagaaggagcgctatactaattctatatctaatatacacattccgtcctaggaaagggtcgctatatcgaagcccctctctagcctactacaaaatatagagctacgcttccgtatcagttaggttaacagtaccctagacatcgtcagtcctattatatccctcctactagtagtagaggccttatttcagaacatcggtagctctaggaggctggaacgtattgcctccctaggccataccggcctcatcgacttccgcgcgcgtttcgtcgagggagacccccgcgttacctgcgctatatataaggggctcagcacctcactgaacgctatccgcgacaccatagcatttactaagggcctactgctagttaaccgatacattaagacggtaaaggatgacgccgtaaggcttaaggtcgaagccatagcatccatgatacgacttctaccagaaactcctttacaggaagggtcacttgacttctaactgaggctgccgaggacggtagcaccctttccgaagggggcacttgtgagggagcatgttcatagcttacataagctctaggtggctacacctagagcgtagacaacatcaataataagcatctttactaccactaagcattttccataatatatacagagtagtgcgcgcttcccggacaagatccgaaaagcaatgcgtctgcattctagctatgatggctactccttacagttacgatatatgaagtcttatatccttgagagtatgttagttaaaatactgtaacttataacttaggtaattgaataggcataactaactagttaactattatgtctccgagtctacccctaatatgttatattatttcttggcattacggtttaaggaacaatcgaagagtgtaggtggtaacactagtttcgagacgtactgtacttgatattctgttatgccattctgaagcagtctaggagtttgcggtagctgttgtaataggacttctaggtcattctcggagtgatatagtagtcggggataaggctaagtccacaatccagagcttaacgcagacgtgccaacgtacgttcctggagcgggggcacctttaacattcgtctgtttggcctgtttgcatgactaaggttctagaaaccctggagttcagtataaatccccctgccaatcggttggctatcgcaaagccaatcctccatgtagtccaatggctatgtcgtgctattgttggagcttgtatctctgcgtatcgctcatggccgctactgttatcgtcgggttggttgtgctgcgcctgccaattatttcgtggcctaagctaaaagatggaacacttaggacgctgctgctgcagaacatcccgtttcttatatggcgatctcattctgtaagtgggtcaaatttaggaattcctgcaagtcgtgttgatagtgggtctcgtagatatggaaggataattgagcgatggtgtatgacatatattgaatcccaacgtgaaggccatcctgatctcgactaacctgtcataggaaaaggggtgtttggcatcgcgagcgaaaccggtcgtctattcgagtagtcagactaggtataaatgaagtcgcgcattgtttgctgatctaacctcgaggcagattttgagactcgccgggcattattctagatacgacaatttgatgagtgaaagccacctgagtagttacaggtcggcgcagcaagctaacggcaaaattgtctcagattagtcgtaatgataggggaaacagaagacgggctggagtgagtaaaagcaacgtaaattgattgagaggtacgactagtcgcacagaagataacgcagggggcggagctcggtgatccgaatgaatagtaaaaatgccccaccaaatcgagaatcaatgagactaagaggtgagggtaagaaacaaggggattacaagggattgaggagggttttatagatccacgcacgggaacgtataacgacaaagagcgctaagccgaaagggttcgtagagccaataatatgtcctttcttcacccaatgtccgatatggtgcaatagggtgtcccggtgaaaagaccatggttctgcgtggcatcttgtgggggaaaccgtggtattttcgcgcaggcaagaataaaggatatatatagttcttgggagatgattgacctaagactagccaaaacacgacacttgcatatcccagcggctccatcatgagtccatcattgtagcccaaaatagtgatataaccggcttatgtccgattcggtccagcctggtaagcctggcgcgtgcaaatcccggcggcttgttcatgagttctgagtagctctggtataaaagccaagattgtcacccttcaaatttcttataaatcatcattcaatcatcatttccttctgagcctattataattgagatgccatcaaaaggtcctcgaagccgatcacggactataatgcctttatccggctgccagacctatctatcaaacgtaagagagccaaagtaataaaataacgtctacggggaattcatagaaggctttattcgctagtatttagataaatataacgaagaataccactctagtcttaacagtggtgaggcttttttagaatatattagagcgaagaaacaggccgtaaccttcctcgtgaattaggacaggatgtggctgcagtattctttaaacagtcaatttgctaatcctttgctgaccagagaagctttctaatgatcttagtaaagagtataggcttaacttacgcgctaagcaatagccgccatttagtatcaacgagctcttacttattacctatcatttgctagatacctgcgatatagctttttgtactttccgatgccttttacaattaaacacgttgcgaaaaatgataacttcaatatcagcccaactctgtctaccgggtacataaggggcaatgatgcccttaaatagaaggatattaagctattcatggtgaaaaccccttaatatgtatatgccgaattgggcacaaagtgcgggcggggtttgggggtacttttgtctttgctggctgtcagatcaagaacattcttttcaccttactcttacctcatcgcaatggactctattgaattttcaaatcgttcagcttatgcaactgaattgggcattgagttccttggccctaacgaattcgatcgctggccagagacccatcgaagattgtttgaagatgtacaaaagctcggcaatcaaaaatataattcgttcgttgttcgcatcaccagagaatctattcaaaaaccatggatgcgcgcaacaaaggcgcgcgccgagcgtctctcaatgttggccgaacgatcctgtcgcgaacacaaaaacgagtcgggatggaggtacgcagttgagaacgagatcatgtaccgcttcacagtggaagtttcctggtaaggaaattcgaacagtttgttgaatccagacttaacgtacggcacagcccgacttgtcgcaataggctatggcaatctgaaatacctgctgcaacgggtagcatcgagcagcaagcccgctcactagaggatcgacgacggaaacgcaagccatgccagtgttcaagcgctcgaggtgacaataggtctgttttgtgttctatcatcgaggaaattactagttattccttctaaccagtccataggtatgatggcggagtcaatatgctcttttcggacagagcggaggcgatgatcaaacacaatcccccaattgtgatatccacgcatccgcgtaaattgaagaattccgaattcccagatcgcatctttggactacgacagaccgacaacctacgatgtttgctagactcgcttgataagaggcatatggaatcgtccaacataactctgcgtaattccatagagctgagtccatttggtgccgagcctgagcctctacttttcccgttcttcatgatagaagccaaatcaagccagggggccgaccgagcaaaaaatctaatgcagtctgcattttgcctccgccgtttgttgaaaattcagcatgaccttgtcatcgcaacagatgaggaaacgcagtgggcaacagggccgctcatatggtttcttactacacgtggagaacagtgggacgtatacgcaggatttgtggaagaagacgatagtgaagttgtcaaatacgtaggtgaaaattattccctacagaaatcattcgaggtgcttactagcgtcagccttttgttcatctgtggaatggagacattcgctggcgggacggcgccttgcagcttctgctggttattgactacatctttgattgggctcgtgatgtctaccgagatgccattatcaaagaactcagcacaatagcgactggtgaagtaaacgaccgagatccagatattttttcgacaatttctcaacagatgtcgcaaattactagctggatggaccccgacgaagcgcaaaccgagctctcattcatttctgaatcaaatgatcccggctttttgaacataagtctaccagagggcgtgatccgtgatgcttctatctttgagtctcgtttccttttgctccaaattactgaggatgacgtcgataattttcttctctctttctcatctgaagaggatgctaaattatggcttcaaagtgtactaaatcatcttgcaaacgcctggaaagtcagctctaataccatctgcgccatggaaagcatttggactggggggctcaggctaacacgtgggaaccaccagcggcatgaattgttctatatcagtatcacaatactgatgtttattaccaataactgggagcctacaaggcagctcacgtgccttgcaatttctgaaggtgctttaaacactcttttagaaaagtttgcgtgcgagagaacttctagctttgaccgttgtccggaagtaggggaatcaagtatgcaaacttttctggagcgcatcttgaaacagtcaattatggataatcttacagcagcgatatctatgctgtgtctctcgagtttctcttctgagcatgaacagacgataccatactatttccaggtgaagaggtcaagagaagttactgctggacttcgagttgataaatctcctcacctgacacaaatggtgcaaagcgtttacttgaaccacaaaatcggacaaagacaaccaatggatacatatgtctccttctcacgccatcaaagcaagcaaaacatcgagtatagaggggatacgattgagatgtggcctcatttaccacgacttgtgaaaagcggaaatgatggcgtattggtggatgggatgttccactcgggggatttcccaagacgagggctctttgttttccgtgatttggataactatgaaagcctatccagtctattaactagggtatcaagggatggtatctacttcaaaactttccagttttgtccggaccaaccctttgtggatggatttcggcacctcaacagcccggtccgatttactcaagattggctaaaacggtcaaagtcaaagtcaatactgtgttggggggaaaagctggaagccttggaccgcctacgcggctgccaattgggtggaaggccatcttctccaatgatcatttcgtcagatgaagaataagacaaggtaaatttgactaaactatcaatggtaataagcgaaataccgttaagatacaaattgttagtttcaaggagaatatattcataccgtggaagcctgggactcaggatcgttcttggtcaatattggatttggaatctaaggtggaaaagatacgtataaagagttcacagcacattatggcgtcacggatgatgatatgcacagtaaagagagaaaagatcttctacttgaacaaaggtctcgctaggcagaataaggctcaagtcggtcctaacatacatttcataaaccagaaaactttgttttcactcagtcccaggggtaaatgatgccgcaatgcaaatctcgagagaacttcgcatctctttgccggggggataaacgagagagactttgagattccgaccatgtagttccatccttacatcataccagatctcataatacttgttaccctgtgatcctttcaatgggacaggatattcctctttccacttggtcaggtccacactgatcatcccagcgctctcacaccctgaatatatgtcagtctccacgttaatcgttaatccggcgaatacactgcaattatataacaagatattactcacctagattgtaaggatgagtaatttggtaatggtcttgagcattctcaatgtctgagtagtacaggcgctgcgaaaagtcccaatcttcgttttccccaaattgttgatacagcgtttcgctaaagcaatcgtcgaaagcaactatttgaccctacgcacggtgttatgtgttaaccagaatcattcaaacccaaatgaacaactgcatgatgagcaaaaggggtgacattttacccttttaatgacccaattgacacagcgatgaacataaagttttttgtcctttgggtgtctcgttccgccgggggtatctctatggccagggtacttgttgtcatattcctcattctggagaatcccgatgtttgccataatctgacgagagggtccgttgcttttgtcgattgcacggtatactgctccccgcgaaaccagagtctccgcctccctgccacagacaagtaagatgacgttttttaatcgtttcgaggggtgaaagtaccaatctgattgatataaaggctggagctcctggaattcttttttcaagaattgtctcaaagtgggtgactgtgaataccctccaactagcataattttcttggttcattaggcagggttgccccatgattctcaaaaattggcagccttacctgcacaaatcttttcttctctttggatgcaactatttgttcttgaatgagcttcgcgataccattaagactgtcctggaaccagccaaacacttcactcctgaaaataagcagaagttagaacatagcctcagatagattgaaaagccggaagccatgtggggaggacgtcttaccacggtactttaaccctgtttttatagaagcctttagtgtcatctgcctctagaccatgaactatgaagtattcaaacccgtcgaggccttgcgaattgtcaaacactcgtttcagagtgccttcgaaatgcggaagaatgttatgctgaagctgctcttcggctgatatgtttttttgttccaaagattcattgtttctcagtaggtctctgaaatgacgctccatagcatgattcacatacaccgagccaaagttcccacctgtttcaaatgtaagggcttgatattcaacgcgaaattcagacataccggtaggagtggcagcttcactgaatcgaaaagggcttcgagaatcgattgtgtaggtggtgacatcctgtgtagtgttgtaagccttgtaatattttgtcaagagaaagcagcaactaactactgtccctcctccggcatcacacacgataaatgtttctcctgtctataattaatgagtttaagcttccaaatacattattgcgctcttatggtccaatacataccataagggatttcgcaccaacgagctggtcaagagcaaatgccgacgccgcctcgggttcgtttaccaagaacaaatcaaacccttgaccaaaacccacagcttccactgattgtttcaagatctcttgtaggctccaagaagctttgagtggccaaccggccggaacagacagagctagctcaaccttgcttgtgtctttaaagctttcaaactgacctagatgcttcttggtgtgtctgaaaacttcgaccagataatctcgaatcacatcgttcacatctttgcctaatgccttcaaagtttcttcgagatcttcatatggtggggccgccttgttggtttgagaatcggtatatgagccatttgtagaagagccacggttcccttgatgattgtgaccagacagcaagtcagctagaagaagctttgaaaacttaattggcttgttagatgcatccaacgcttcattgggcagaacctcttgggctttcagttgagctccgtagccccagtaaaaatcatcgccgaggtacaagctttcgctggggacctcgcccctattgtgactagaagcagggttgggccatgcaataactgattttattgcattcttgcttatacctgttgttggtcgtttaccaagcttgaatttatagtatgaaactgaggtcatggtagttccaaagtcaatcccgacgagaaatgtgggatttggcgttcgggggttgccatttgatcgcttcgaaccaggcgaatccactggttgttctccgaccgtcttgttggagcttgaagaggtgatacgttcattatcgtcagatagaatgtcttcgtatcgccgctttcggtagggcatggaccgctttgacgtgggaggcatatttgatcgagtttcgacgaatttccaaaataacccctggaggtagaaattaaggggcctgtccgtacggaaaattctgtgcgggctaattcatagccacagttggcgcttgcgctagcagggatctcgttgtgctgaggttagcatggcgcagctaacatagcacagcctatgaaaccgccctcaccgactattctcgcacattccagtccaacccctggaaactctccttatcttcgtcagctgcatcatcaatctggttttgttgtacatggtggtcacctgaccatcagcccggtgcggcaggcaccaacccccacaactagatagttgggcattctgcccctttaggaatagagaactctctccctctctcattccatcactacactgtagttgcatcgggtttgaattctcaaacatatcaagatgagtctggaagtccagatgccgggggttggatcatcgcgtgcaggatccacgagctctggtctcagactcgcagaacggtggtattatgactccactccacccataccggaccagagtgatcattttccatatctcatgctagacacaaggctccgtcctaggcgagataaacgcagggaggaatcaaatccggcgcctaggcttaagagagagctgtcagacgactcttctacaagttcagcggcggttaagaaccgaagaatactcaaagtttcaacccaagtaggcattaaaatcgattgagtggcaaccattgttaaggaacactgaccaacagtactttagcggctcaggggagccgatcaggcttgcgtcaattcgaccagaatctgtgagacaaatacgagtgcatcaatccccgccaatgttgaaaccccgcatggaaacaccagaaacacggatatacaggacaatccagtttccatcagagagactaaatcagacatgggtcttctgaagcggcagaatgacctgctgaagcgggagatcgacctcataagcatccgccgcgacaggaaaattgtttctttacaggaaaatgtgacctgtctccaagaattcaacaaagaactcaatacaatgctgggccaatacagagaaatgaaggaagttgagacccatgcgtctggggtactggcagatgaagtcatggaactgagagcaaaactcagacaaagagacgagcaattagaaggaaaaatccaccagatttctacacttgacgagcagcttagcgctcatgaggggatgatacaaatcaaggaagattggcgtctcgattttacttgttcctcaagcttctcaaaggctttggctgaactggaaggaaggacccggcgcttagcagacatgcttgcgcaatgtttatcgaggcagaagatctcaaaaatgcgtaaaaagccacgcaaggaaaagttacttcatagcttcgttaaacgcctacttggaacagtgggcgttctggataccaatccaattgaggcgatgcgcgccttaatctttggttttgtgcgagatcggatatttttctctgaatgctggacagctctacactctgagggctatatactgcgagaattacaacagttgatacgaaagacctgtatgtgaccagcatgcctcagaacaagctttggctaacctcactgtttcacccaacatagcccctcctggtaccttggaatcactgcacagagcttctgttgaatcaatgctcaacgatgatcatcagtttaagcattgttggatccaaaaggaagtggaagatacccaaactcagttcctgaggctattctgcccgttgttcgatactcaggtgtttgaagaagtcaagcatcagatcaccagagacttgggaatcgcttttgaaggtgcttttgaagcccgtgctcggttcataccgcctgaggggtctcggtatagactgttacacttcaaggctggggaaaaattcgatcctgcttatatgaagatcgaagaaaccaattcaaaagcaacttctgcaatttcccatcgaggtattcatcggattaaggtatgtgtccacggttgccttattgagcaccccatcaacaaagattcttcttccggagatattcctcaatcactggatcagcctttgattcctgaagacggggggctctgtggcagagaaacagggatcttgaagagcgataaggcaattgtcatattggagaattaaatttatctttgaaaataatgcatataaaacagccttttcatatccttgtcctcgccttggtatctgtataaaacagtctgtgcaagcttcaccaaaagctcgcatcatttgcggactatagagaaccacgcactgcaatgcacagggacggagagcgctcagacggggatgcaaaagtggaaacaattagcatccaccaagaggcgtggtctgagatcgaagaatcgtggcgttgtaatctagctattgttctaatttggaaagccaaaagtcatctagtggatactggctcgaacttcaggaagacatggatggcttaattagctcactgtcaaggttgatggttggcgtctatataggcttgtttttcattgtggcaatcttgctaatattttgtttccccacttagaagggttcggtcgctgattatttttgctcaatttttgaagagatgaaagatgcgaacgtaatgaaaaccctgggtaagtggactctctggacatttaagcttgtcgtgagcaagtatatattgatacgaagagaatctgcgccaatttgctaataaactttataatctataaatctataaagataaccaacctactcttcggtctcgaaaattgaagataatatctaggtattgcagtgggggtttccacagcatgatgactaaggggctatgtgataataaagcacccccgaggcatagatagcaacgaagacacctttccaccttcacttctcaggagtcaccccatggtgttctcctctctagcaccctactactccaagtgacgattctgctctcacacctgtttcgcaggcaggcatgtcgttgaccctgtcccagggtcccctcttcagtagctactaaaagcttggtgttaagaaaagaaagaggcctacctaattattaaggcatgaataacttgtataaccaattttctaggtgagctctagaactgttcaaaggtgagctcattatgatcagctttatagaaatgagctcgttatgagcaatcctctaatctctccatattaaggaagaagaagaatctctgtttcagatgcttaaggattagtcttgcaatcaagatgaattatactgccttagagcctcatttctatcctagttgatgtaatttcatattcaattcatacgtctttcactatcttcttacctggactttaatcctaacaaaagcaagatagtaggttagaatcactaatgaaagctttatattagccaaattcataaacagattagaaacagagctaaaaataggtggttaaggctcaggtagtgaccattaaatggctttgctctagctaggtacctagttgatgttgattagtataaagccaaccttagaaattgccaagtactgagatcgatctggacgccacgaggggtggggcataattatgcacatgtgagcgctttataaaatttatctctcaacatagtttactagctggacgaagaggatttctcaattttcgggaatcaatttcccgagaaagtctggaagtcctgctgcatccatttagaggctatacttaggattcggtgaaaaatagggtatttcaaactgaggaactgaggtattgaccttataaacctgtattcttctaacatccaaggctagctaggtaccaaagggaagaaaactagcagtggccccacttgggcacgtcgagccgttctgttcctaagccctagtgtctctactccgtacgtaagaatttcattcctttcggagtaagtaagtaaaactctttccggtactagtagaaccattttttatcatggtaaaattcttagcgctcataaactaatttcaaatggctccaccgagtgcaatttcccttgttacgccactcggaccctcaaggggtatacgcctcgacttcgctaaatagtagtcctcctgcctcgcccacttgggatacgaaattgctttaatttcgtccattatctaactctcctctatttaggagagcttacccaaatacattgcaatgatagtattgcggacattggcccctactgccgccctagcactggcagttttgctacctctgtccagggcacagcagttcgtcggaaccaatatgtttaccaactatacgggactgagtacagagtgtcaacaggcattggcgacaaatgtgacctgttcaccgtacctaggaatgatctctgagaggtaggtcgatttatagccagatatatggcccctccccttagaacagaaacgctattttagaccaaattactgatgatcgtgcagcaatggtattatgacaacggattagatcgaggccgtatgtgtcgatggctgctatagttctctggaaacagccagaactaccatcgtcagtgaatgtacccttgatacggatatcatcgtggtcgagaacgtggcataccccgctatattctttgtggataattacttattcacatatgagttgtcttgccggaccgacagcaccacgggtcagtactgcgatccgctcgtagcctcatggtcgaatcagtctcttacaacgagccagttgtgctcagactgctggttgggcgggctcgccctagaactggctagtcctttcggatatgatgatgttatggcgcaaaactatgcgtctctgacatccagctgtaatgcgaccacttacagctacgccactccaacgcaatatgcactgaatgtgacggccacgactaaaccagcggccgtcacaaccaccatggcatcgagttgcacgggttcatacgaagtatctgtcggagatacctgcaactcggtggcccaggccctcaatgtgtccacgtacagtctgctctacatgaacaacctggatctatactgcctgaactgggactccacagtggttaatactactctgtgcatcccgccacagtgcgagactcgtgtgtggcagtcgaccgacacatgtgatagcgtggtcagcggcctgtccaatgtcacgattccgcagttcctgacctggaatcccaatttcaatgctctgtgtcagaatgctgtcaactatattgactatgtggtttgcatcgggtgggttgtaatttctcgtcttattcttgtcccctattgactagaacataatatgctgaccatggcccatttttaaagtccccctggaggttatctcaaccacaccaccgacatgacaggtaccgccacagtacagaacccaactaacatcatcacggccgttcctgcacccacaaacgccctcaatggatccaccacagactgtggcctgtggtatacagtacgcttactccttgcccccatgcacctactcattccagttgataataatcgatataggtcggagagggagacacctgcagtctggtcactgttgccaactccatatccctcgtggacttctacttcctcaacccggagatcgatgccaactgcaccaacctcgagcttggagaggcttactgcattgccgctgttggagacatcagcacatactctggctatccagtcacaacccccttatttactgtgaccaccgccagtttccccgccgttgatacgtcgattcccacgaccaccagtgatccgggattcatctacactccaacgtaccttcccacggccccggacacacgtacagactgtgtgcgatacgtcaactatgataacagcacttataacctcaattcttgcaagtggattgcctggctgaatgaggttacaaccgccaacttcctctcctggaaccccagtctcaactcggatctgagcgcgtgtgccatgcaaccggggtatagttattgtgccattctcaatagttcgtacagtgagtatttcttttgcgatcctgcccctctttcgagttcaagtctaaatgcctttctcttcttttcgtgaatatagcaaccggcgatgactacaccaccggcagcgacagcgaggctatcagctcttcacaatgcttgtctcttaatgctaccgagcccagcactgtctcgaactgcaactgctttacggggatctatagctatcaaagtggaggtatggaagaattgggaagagtgaaagataatcgcatacaagcatgctaatcatctctagactatgaatgcgctaatatcgcggatgattttgacatcaccgaggctgaactcatcgcttggaacccctggctggcgaccgactgcgacgcgaatctgtacgcaaacctcgccagtggtgatatgcgtgccgtctgtattggagtgaactccaccgtgtctgcaactaccactaaccccagcactgctagtgctactgctactacatcggcagtaccgacacagactggatatattgatggatgccaggagttctataccgtagagtctggtgacgattgttcgaccatggaggctgaatttggagttacccttgcgcaactttatgcttggaatcctagcagtaagaccccatcccatattgacctctcctgatgtccaggaacctaaggctaacttaaactacagttggaagcacatgtacaggcctctggcttggatatgcctactgtgtaaagggtcccgcggccacagcaagtaccacagctagtgcacccacacagactggcattgtgtccaactgcaacgaatatcacactgttgtttctggggactcgtgtgcggcggttgaaagtgagtacggggtcacctttgcgcagctgtatgagtggaacccggccatcgggtcagactgtgaatatttgaatgttggctatgctatttgtgttggcgtttcataaacacaaagaaagccgttggaggggaaaagaacatgtaagtagatgtaaagaacagaatactattgcctacgtacattcttctctcgtaaatagtagtctaccggttaggatgactacatcttttcccgcttcttcctctctcctcaagaattaaaaccaatagccggtggccgttgatactcgaggtcccaatccgactcattgcgcatagtcgtagaggctacaatctgggctcgatcatagtgaaccttcatccagcccacatcttcccgcgtacagccgtacaatggctcatactcatcatcttcttcctccccctcaggaatttctggggcccaccgcccatttatcatcaccacaaacccagtagtattcaactcgtccaattcatcctccggaatatccaacacggagcgcactgcatcctcatcaaccaagatacaaagccggtatcgggctccatacgcccactccgcacggtcataggttaccccttgctccgtctcacaggccgtcctcgcccactcattaaaagcgtctcgtatctgagcgggtgtcgcttcatcaaactgaatcttatcctcgatcacagtaggccggaacgagtcccacatatcgagaccttcatagtattctagtgtccggcggacctggcccaggaatcggcggaggaactcttcccagtccgagtcgcttttgtaagtggttcggtatattgcgataccccaggacttgaatccgtcatcttgcatgtttatctcgatgaggtcggcttcattgaaggtaactgggtaccctggggttcttttggaatctttgatcaccatagttggtgatgtggacgaaaatggtcgaatgggcaattgaaattggagtgcaagattttgatggggccccctttttttgccggatcgtgctgctgtgttgtgccttggcacgaggatgggttgtccagtagtggatagagataaagagacgatgcttgagagagtcctgcgggcactagattgaaatgcgggtcttttcagaagacttctagccctgatagagatcattgaggacattgcatgatttttgatttagtaggaagtaattcagatataagagtcgggagaatcgcggtttaaaattcaaagtaaacagcgaatggtcctgatgtttagagtctagaccaaacttggatggccatccttcggatttgatatacccctcaatgtgggactggccagttggcagagatccacgtaatgaacaagccactcaactcatctgttcaaatatgcaacctttcctaatttttgagtggaatcgacaacctcatcgcagaattgtgcgagattgaagcatctgagctcacagaggaatcttttcatcacatccgacaggattaacaagcagtcccgcagtgtggccagactaatctctcattcatctccatacaccactcatcctacgccactgctttgccactaaggcgtcaaagcgctacaaattggctatctgcccccaaaatctcgatgtctttggggttcaatgccaatgtctcggcacagcagctggtcgacattttgccagttggaattgccatactcgatcaccactacaaggcaatctccgcgagcagccgtttccaggagctgattccatgccctgaatctgattccgcaaatgctggctacaatcagttaatccagatgatcatgaacgtgcgattgccgcgttgcgagatgcttcggaagatggggaaacgctacgcattgaatatcgcacctccgacccggcatccgtttggtgcgccatgactctagagaagctacagcacacagatgtccagtcctttaggctgaatgaacacggtggattcgtctgtacagtcaccgacataacatccgctaaacgggctgagatcgtagtaatctacgtcaccgccatctgcggcttcttttccacggcgcatcacaaccggacgaggtcgagggcaatttttatttaacgggagtcattgcgctttttgaagtaagcagttacctgattgtttctttcaattaacgtcaggcaggctgtcataagacagagatggacacaagacaaagatagacacaagacaaagatagacacaagacaaagatagacacaagacaaagatagacacaagacaaagatagacacaagacaaagatagacacaagacaaagatagacacaagacaaagatagacacaagacaaagatagacacaagacaaagatagacacaagacaaagatagacacaagacaaagatagacacaagacaaagatagacacaagacaaagatagacacaagacaaagatagacacaagacaaagtgtcatctactaaagccaatcgatacagttgatagcgaaaatggatttaggtctagacaaatcgaaatatggcatagagattcaccgtgctacgtatcggttggcggcaaatgattggcgagtaggtaccccttgtactcggtcgaatccattgtcgatgatattagcccctgctatgcgtgaacgatattattctggtatggcgagagctttgaagtgacaagttgagtttcccttgactaaatttgttctgtcaagaaaaatcttcttaacattttaacagaagacttgcttttccattaagggtgtgatttataaaactgatcaattgttcaaagatgatgtaccattgattcgatgagcggtactccaaagtggagcaaagagtagcagcgtggagccaatcagatgtacaactttatgcaaaaacgggttacccctcagattgagatcccgcatggcttgattcattttgacgacgacctaatattcctaagctctgcatgagtgggcatctgttatgtacctgcgctcttgcaaccgctggttcagagtcatatcgacgacgaagcaaattcgcttgggtgaaccctccccccctccccttcgtcccccataaagcagcatcgtttgaatttatacctcttggttctttgatggtttctttactggggatatcagcgcaagctggggtgtgaacgagtggtttgtatactcgaccgtagtaaatccagtggaattggagctagtcaacctcatcttgaagctttttgatctccaagacccttccagtcgcagccaagccgtcatgtatcgattgaacaggcgcctagagtatgagtgtatcatgcccagaatcctcgcattcatcaggatcatatgatgatcgaacagtatcctcagggcttcgccagtgccgtcgataatagttaccaatgattcattgccgggtatctttcttctcagtctcataaaagcgatggcagtcgagaggcactgaccctcgtgccaattataacagtttgggcaaatgagtatttctatctggtcctcagtaaccataccaattccatttttgatctcattataattaatctttctatcttgggtgtccatacacctacaagatacacgcggcctttgaacaaaattcactcgagatctgctacaagtcagcccttggtataaacattgaccgaagataaacattgttagaccaaagccatttttgagggtggtacgtcttgcactcgagatttcaggtcaattttcctgaagaacttaacccaagatacttaaacacccaaggttcgtctggaaaacgaaagtagaaccaaacttttcaattgaaattctaatggattacgcgaatccgttcgcagattttctagtcgacatctgtggagaactggcagatctacctaaatcttccacttcctccatggctatatacattggctagctaggccggttgtcgacgaaacccgttcttttccctttacgttgaaaatgcgcttttgtgtcacatattggacgaaacgcaacaagcttggctaaatacgtccagaatcagacaacttacaatagttttctctttgtgcgactaccacaacttggtgtaaaagacgccctgcgggcacttaacggcgactgaatgtcgtgcttgtggatcttgatattttgggcattttaaagttgccagaggcttcgcctattcaaccatcttccaatgctcctggccataaaacgatgctactttcactattccctaaggtccagcggtaaagagagcaagtattggacgagaagtgctgttgttgaaactactctaaccttgtgattgtggatacagcgggccagcgcttatattatcccgtccagcgctagaagctttgattggtctggctaggtcccccacttcttcacctcgctgcctggcatgtccggcggcaacatgtttcttctctggaccttactgtcgtttcaagaactcccttttactagaaatcgataggctctcagtctgcttcgattccgctactctcgaagactgagtcttcctatcaccgccgagaccctgcttcacctgtttatctcgatgacgcccgaggggtttgaaggcgaggccggccttcacaattcaagccacaacacagcgaggatcatttccgactctagctttttcagggaacaccaggcgtctacgctccctactccggtatagaggagcctataaagccgaggaatgtatactggcctgcgagtcttttaattctcaattttatgctggaccttcgcgaattgatgctcaaccgaccgggtaaaactgcgaagtacaacgagtaaatcattgtttgaagcatggaggctactcttaagtagccaatgcgcactttctgtacgagaagtagcgagttcgttgaggtgaagatattgtgaagtgtagcaatgaaggaaatgttcttggcagtcgtcgatccattctttttggatgtgttcgagaagagggaggaagaggggaggtgtatatcgctctttgaaatcgctccattgtcggtccttctcttcaaacgtaacggcatatacaactcggtttcaccgctgaagcatcttcttccacccctcttcggctttctcacggtcttcctgggcttcagcgggggtaaggcggtacgaagagttatctccacgggcttctcggcgggcttgtgctacttgatcggcgagaagggggcggggtttcttcaaaatgttcatattaatgtgccaggtgcatgttatatgctttgtatctgggaaaatgaactcaattgcagttagcaaagctgcctctttatccgtgaggattgaacgtggggctgcaagaccaagggcctcgtaggcttccagaagacagccaagcattgccttgtacgtatggtctttctcatctcgcataaatgcaaaagcaaggtggaacgtagagccagtagccgcaaagccaacaacatcaagcagggggaggccatatcggttggtcttacatgtacagtccatggagataaccatgggttcttttgaagcattgagatactctcatacttgaatatcaacttattatttttgggaagttctatcaataacgcttggagaggagtacatccagcaagaaagagctggtgtagcttgcgacgcgtattgtagatatcctgggaatgaggatagtgtcgggatcggtctcacgtagctcggtaagaatctctttgcttgtacggccttgctgaattgcattggctactacagccttcttatgggtaagatcgagagcgcgttggatagggtgaggcgatgctggtgagggctgacggttgtgggtagggatctcaacggtaagatgtcaaagacaagtcccaatgactagccgaacagccatctgaaaggggtatccgaggcgtagtgttgtaattctccggcattttcggggtatgggctcattctcgtcgtcttcattggtattctcctcatgggagcacgcagcttctaagtactgggcacctttagctaatatcggaattcagcacagctcgataacaattaatattcgataatcaatcatcaagaccctagtatctagctactctctacattcactgggactccctgttggttacattacatggcattgaatatgacgacaaatcatctcactaaatcgatattaaataacgaaaacggaggatgtgactaacttggttaaatcaaatttatattacttaatgttagtaataaatatttcgccatctagttggaatgaccttagtggtatgttagaaaaaattggaattggtaaaaaggataaaaataatatggagacgagtattgctataaatgcaataaactaacgcaaggcgaatttatattcgagttactggctatctgacccttttgattaattgtttagatcgtcttggtttagggtaaacgccgttagtatttgaaagtttgcgtttagctgactatctgctataagagctataaggtggttcactcgtaatacattttgtggtactatatagtatttcctgcgtctgagattaatctgttatcgagtaggtgtctggtatactataaaccggatagttattgtctttatatttctttcgattagtttctagtaaaggttaacgaaaagtatattaagagctaagggctataatatacccgcttggctagtttgactatagagagtaatagagtgatcttctattaccttaggcactctgtccttagttactttattatctaggtagggacaattctgtttaaggattcgaggctcttctagatccttataggctagctatagggatagagtagaaatagaattaatatctgtatacttgtctactagggctggaaagcttttattaattaatctctcctagaattctagtatagctataatcttagtatcggtattagaactaagctactctgccttattatagctataatccttactaatataaatcactatagggttagaagctgagcctaaaggagtaggattatctctaatcactataggattagccttagtgcctaacttagaagaattgataagtttatatataactagtataggcctatccgaatgcttattagagtttgatacttcgtaatactaagttagcaaaatctataatactttaagaatatcccttactgaaggtattgtatatattatttataaaagagcttatactaactagaactagaagtagaggtagaaataaatgcttaataattgatatagggtaagactaagggctataattaaaatcaaagacctaatccaattcttaactgttactatcggagaaatagtatataagatatatagctttatatctcttgtctagcggattataccttatttagcctataggctaaagcgggtacctttatctaggtcttaactttagaccgtaaggcctagtaggatcgcttctagataaggcctatctgctaatcgtctctatgtctaatatatattatataggaatactatacgaataaccagcttattatctatttaatctaataatatcacaaagcgctattactatttacggaggactgcactcctacttatcgactgcgcctagtaacgtcgccaccgtttcgattaagctctgtgtgccagtcgttctatagcctaggatagaagacgaaatatgtaagacggacgaatatagagactaaggacccccttatcatccctagtccgcgcgacgtagatactataggagtaaatcctattttcttattagtccacttcgccctctataccacttgatcatgaagctaacgaggatttcggtcacagagcgccttcggtgacaggggttaggactgcgaagatctccggaataaggacgaccacgaccccgagatgataccataataatgctactattcctggagaactgcaagtacgcgcatcgtctgcgcccaatgtcattaccactggattgattgagctctgctcgccagtcgttccataactcgagacaaaagacaaaacgcggaagagcggaccaacatggagacacacgctacctccatctccagtccgcatgacctgttccttgtccttctatctggtcctctgtgccaatcgatcgtgaagtcaatgagttcggtcataaggcgtccagtcaattgagctttacttgccagtcattccgtaaccaatggctgtgaatgagacgcttatgaggtactgaccgagaaatcaaagctgcctaatcgcctccagtcctatatgtagcttgtgttaaaggattcaccccctgttgttttatccgtccatctcagtatgtctgctaatggataaccacgtcaaaggggtggtcaaggacaaggcgtacttggcgagctgagttctactcgactatttctgaaactagaacgatggtatgaaggatggagaggaactggggcgtgcaaacggtctggggaggtcggcgagcgatttcagagatcattgaagcgcctcaatatggccgctgtggaagcttcatattatgaagagcagggaaaggaggggatcatgttatccagctttagcagacgcttgtatcgttggcttacgtgaattgctgggaggagcgtccggtcgaatatgcaactgatgcgttttaaccgacattcccctcggttcgaaattgattggataccatcagccacaaggctctcagtctcgtactgggccccaaggcagattcacggacccgctgcacataggcgattgtccacagagggcctagggcgactgaaaccaaagggcgcaatggatcgacgacggaccggccgactgacatgtgaggacggatctgccggtcggcgtggcggaccaagggcaaaaatgcctcatcccgagcgtaatggcgagggctgagagggaacggggcagggcggaggaagcagcgctgattgcgctccaggggtcggaggaccgcaaaggactggctagttcacgccggcgatagcggggagtggcggagctcggtgaaccggatcaatggcaaaaatgcctcatctgcaaggctcgcatggcgggcgggtcggggggcgggagaaaggaggagcaggagagccaaaaagttgaaggggcgatgggggaggactttatagaaccacgcacgacgacgcacagggcgctataacgctagaccgaaaaggccagcgctaggcctaataacgtaatttgcggaaggaatttcaagcatccgatatggtgtagtggctaacatcgccgtctctcacacggcagccgggggttcgattccccctatcggagtttctttttgctttttgttctgtttcccttcgctcttgtctttttgattattttctacaggaacgtaatggtaaagaatcgtttacatttcaatttatgcgtgccattgttatcccgtaaggttcctccaatcttaggttcaccgccctcgatatcgcgacaggaccgcaatctggacccttgaactttttggaagatccatggatgtgacgcgatgcctatttgcatcgagtgctcctatccagtctctcacctgtacagcgcctacagtcgtgctgatgaccggtcccaaggcaagggcgtgcgactgacgcaatgtccccggtgccagcggtttgccgataaatacgttgaatatgactttgtcgtgctcttcattgatttggtgctcattaagccccaggtaggcattatacatgttctcggtacgaccaggctgacttatctggaaacaggtataccgacatctcctcttcaatcggctcgggcgagacgacaacaaattcaatgtgggtataccatctcaaacaattgtgagctacgtactgataatgtgacctttcagcggtccatcattcgcctcggagttcttctgcttctcttcgacgtctacctgacctgggcacgcatcgagaaggacccatccctcgcaacaaccttcctgtcacgcgcccctatcatcgtccagtacctcttcttcctaagcttgaatgcagccgcaaccctagctcaccacctcaccgtgcgccttttggcctcaatgctcgttccaaagtcgcgccaatacagcggaccagacagcagcaatgccaacaccaatcctagcacaaagtctactggagatgccaccccttccgctcccccaacgccaacaacgcatccctcgccatccggagtctcaatacacccgcacgcccagaactccgccaacccccccgcaagcctgctaaacccaaacccaaccccaacccctagctcatatagcgaggtcacctccccaacagacctatccccactaccgcaaggtacatcaatgggaccatcacctttacccgcgccgcccctgcgccgggcatcaacagccccgctgcagaacattcagcccctaccccctccaacagccgcaagcccagcagcgatcagcaccgctctgctcgtcagcagctgcgcaaagctcttcccaatcctgctagtaatctggggcgctgacggtagcggcaacctctccgatatcccagcgcacagccatacagcagcacagatccggtccgcgacgcagtcggctatggtttcgagcgcggtgcatcagagcctgttcgccacagccacggaaacgtcttccctgtgcgcgacagcggctatgtcaagtccgccgtcggctgcagttagttcttcttcgtttctggaatcgtggcttggtgtcacggcttcttcgcttcggacttctacgccgactagttatctgacggggctttttgacttgcttgcttcattgctttctcttggtgtggttgatgcgcacctggtgctgctgagtaatatcgaggccttgtatatcttgcttggttgtgggtatttgcgtgctgttgctgttgctgttgcgggccagatcgcccggtgggcggtgcagagggtgattctgggtgctgtgggagttggttaacggagtgattttgatgaatacttaggtacttgatatgaaaactaatttcacctagctttcctagcgtccatgttgcttagggtactctacggcgtaaatcaatcggtcgacctcaccgattagtacatagatatagtcgtaggcagtattggactagtaaaatgacctaaaagggtatgaatgctttccatacaaaaagaaaccggccaactgaacaaaactgaatcaaaacaaaagcatacacataaaacactgccaagaaaaggacatatagggaaagctatacaaaagcatgaagcagctacgaactcacacaggttcgcaatacagaccaagcacacggacagagaacgagaagcagccttcattcccctctaacccaggcgcctcgcagcgcgggatgagatatatctaacatcatcttataatatcccatgacaagaggagacaatatctcacaaccgacagtctccaaagtgtcagttgacagcattgacgaaaaacgcaagaaaccaagggaaatgcctttattgcggtacgcgatcaggtctgatgtctgaccgctttggtgcgatgagagggtgccattgtgagaggaagacgattgctatattgattatgttagtatctacacagatcatagagatatgtggttagagagcatgggtaagaagaaacgtaccccacatcaaataacaagaaacgaaggtaaggatgagcgtgctgcggaagaggctaaggaaagcagagtcagtattctcaattgcttgcaattttgaaaggaagggccgctgggctcgcccagtatgcaaagagggaagcatagactcacgtctgattatcgcccttcgggctcaggaaccacgctgctgtcgagagggcgacaatgataaccaggccaattaacaagctccagctgttgaagtttgtgttagcgactatagtcttttatcgagtagagtatccgggggtcggcgcgtggcgggatagatcgaacaatgcgaacacccttaagcaagtaatcatcgatccattgctcgagatagatatgcattgtttatcccatcactccgacagagggaaaacatacccgtttgccattttgtcggtatttgttattatcttcgttcgtcggagtaaagtacagcccaagtggagatcactcggtatgttatgcgattgtcggtgtgggcgaagagcgggcgagctagggaggagaccgcagaggaggcggatcgtttacttgatggtataaattctgcgcacgagtgctcttgaatgtccggatcttttgacagcgcgggtagacggacaagtaatcgattgctcggtgcagcgtggcacgattaggatcgacttgatggtatttcggggacgtgttcaagaaaccaagtatccgggagtccttcttgggaaagacgtagctgttaggtatgttgcgagctaataaaaggcgacctggtgagttggagtatctccgttgatgtcggagctcctggagctagcatgcctgaggcagaattggcgggcggtggaccatacgacatctatacagcaatgaagacatctgttctactccgtacatttccctacaatatgaaatttatgagaatacatataggagcttcttctaggtccaaaaatacagactgaatgatctgttgcttgggctcagctgaagcaaagcggcttaggtacaaaacacaaggccatggctcgggataacagacaaaatcgaagccggacagaaggataacaaaagaaacatggcattcaaaacaacacttaagcaccctcacggatcttgcggtagctggcctaagaaaaaaaaaaacgtggttagatgtgatagacatgtagaaggagcatcaccgagaacttacctcctgctcgacctgcagtgcatctacggttggagcaagctcactgagaatctcatatgatttcttgtggaactcgagctgagcggcgatcagatcggccaggttgcgcaggggctcgggggtatcaaggaccttgttacaagcaatgtgagtaccactggacagatttcagaacacaaacagaagatcaaccagcacttacatttttcataacgctcacagcctcctcagtctggccaacaaactcatcttcggcctgctcgatctccgcgcgggcatcctcgctcaggttatccaggtcgccgtgggcgccggcctttttgctagccttgatggagtcgagcatcaagcgggcattctcaacattcttgcgcgccttagcagcgaacatcaagttagtgttgagggtggtattccagccggctaggaagcgagactggatctgagcatcctgggctagacgagcctcgcccacctgctcctcggctagagcatacttctccaacgcagtggcgagtgggtcttcgccctcggtgctctgtgcgagtgtctgggagccggcaagggaggcacgggcgatcgcgtggttgaaggtcttgggttggggctttgcggaaggcggggctgtcagggcagcttgtgcctcagcaggcgaagctgcctgggacaggagctggactttctcgctgatcgtgcggcccaggtcattgaaggattcgcggatgtttggagggtagtcgtaggcctcattagagtattgggagctgctcgcgagagatggcaccggttagcaccagtgcggagagccatccacagcgcagaaagcaacaggaattactcacgtcacctgcaacagcttctggtggacaagcttgagcgcatcaacgcgcttctcgagctcgatgtattcatcagggagctgggtcttgtcgtcggcctggcccagctgctccttgatcatttgctgagttcgctgcgcaaaaggtgtgaaactcgcactgtccgtcagaaaaccaaaaggcaagaagatgttagcaaagcgaccaagcacaagtcgagggggatggaatgaggtccgcgggataggggggctatgacggtgtactcacctgaagttctttccgaatgcctgcattcgatccatgattggtatatttttaaacgttttagttagaaagaaaaaggaggagagaatggcgagaaacggatgcgtgtgttgatgggatattaccacatgtgctacgcgggcaggatgaagcctcgaccttgcaccgcctcatttacgccacttctcatcaggcactatcaggcaccttcctttttccacctttatactagacattgaaatccatgtcaaatccatgtttcctctaaaagcagccctctgtaagtatcgagtgtttggaatttcaatattgtacttggagatggtctgcaaattgctaaaagatacatagagaacatccggaaatccccattcagaacccagaaccactgagtcaaattaaaatcataacatcgtaactcgctggttcaaaagcaaagcatgaaagcatgaaagcattacgcaaattaggttaggtcagagtggccatcatagcacgcatgatgcgggagttgggttctagagaatgtcagaatcaccgaaggggtatgtatagtaatctgtggcgtcgtacctgagcgctcctgcctccggacctcagtaacctcctcctggttgcctctttcgtcaatgatatctgtttcgcgttgccgagtgatctcaatcccaccctgcctctctatacgaagaagtcttgtctcctcttccagattgcgaatgtactcattcacgtcgtcatcgctgtcccgtggacgaacgacaaccatcgagctcgtacgaggactatccaattcccgctcttcgatgtactcaacgggagacaagatacggggtccgcggtcatggactgatacagctcgtcgccgagagatccctcgcctgcgcggcctctcgacaatctcctcgtactcatctgcatagtggcgtgaccgtgacctgtgtcgggagggtgatgcttccacgatgaatgcctggctcgtgcggggagaagcatcaacacgcaagtgttctgtcgtcacccgctcgcgtgcacgttcccttagcggaggagatggagcaaattcgacatattcggctgttcgaaaaaaaaggccaattagtatgatcttcctcatacacttggggatccggatacgcatgtatatgccactcaccttccacggacggaggccgcctgaactcgcggctcaagctaagaacttcgtcgatttgttccttcgacaatgccttttgaatgacgatcacatcatcctacctaggtcagcagccgacaacagcactatcggaaatcaaacaccaacctcttccttgaacgggtaccctagatccatgatggcgtgaatatgagcaaggtgacgaggaacacgggtcttccctttgcgtgggtaaggtttctcctcatgatgtctgcgaagggtactgctagaccggcggcgacgatcaaccatatctcgctcactgatatctctaaattcttcatcaccatagtagtcgggttcggcgatccttatatcttcgtagacttcccgttcgcgataacggcccggagaggggaggtgacgaggcggagcaacgagaggtacacggggagcgcggggtccaacatctcgggcatcaaagtgttccatattgcgccttggtatgcggtcaaaggtatccaaagacgactgccgcctaagaagttgaggacgactgaatgagggactatcgtcaccgcgccgacgccggtcatgcgccacaagagacatggaaggcggttggtgatctagatggtcatcctcatagagtctcccgggtgcacgagcagggggtccatatcgatcttcctcgtggaggcgtgattcaaagcgctcttcgacatggcggggtcgttcggccacgggggggccccgtgagtatcgatcatatcgatcgcgagagttcagtgtccccgttgacgagcggtagtcatcatagcgagacatctgagaaaacacagcaaggatgaaccgtggatgacgcgagcggctgacttccgtgccgagggtggggtaattcgagtaaccacgggtgaagagagacctcgtgagaatgataggaagagagagaaagatagaaatgagccgagaggcagcaatgaggagagagaaactgaaaacagaaatcaagaatcagccttgggagagaagaagaagtaagataaataaaacgtcaggcagaagtcgatcagtgatgacattgggtcggatgttgattgcatgtggggatacccggacacctatttgcgccacatgtttggacaaagtacgggcactactgtatgatgcgactgtatgttgcgcttcatgtatgtactatgtatgtagacacggatgcattgtgtagttgatccaatcctaaagctccaaattcgcaatgtcctcttccaagatgcccatagcccaatgcgctcggtccgacttgactggcacaaaccgacgatcttttacctcatgcagcaccgcctcagactgtggcgcatacattagcttggatgttgagggccaaggatatccaatagatgtactcacctgacgctcctgttccctttcccgatctcggtcagtcttgaatgactgttgatagggtggcccacggccttgcttggcagcggctatccaagctttctcacagccaccggcgatagcgtctgcgctcttccacccggtcaggcgggagatgtcacgaagtgttgaaatcgtccaagctcgctgcgtgggatcactatattgcacagctgcgaagaatagcggcaccgacatgtcagtcaacgaagagcccagattcggattcaagcttccggcttcgaggttaaaacgttgcgggtagtagacacccgccagaatcttcccaacaatctgcgaaaattcagctgtcgtgggagcagagactccagctgcgaccatgatagccggtggcatagaaggatgaatccggttcagcagcaggcgcatggcataatagaacccccagatcacggcgatggtatgggtacggtattggagggcaggaccgaacggtgtagatattgggggcgcgacgtctgttggtaaaggctggaaatcgcggcccagcgcttggtatagtatttccatggcgacgaggatctcttcccattcttgttcggcttcgttgtaactcacgtcgtgagcggggtcatcctcgtccggtgacaaacgaggctcacgcggtgtattttcgaatccccggggaagacgtgcaggcggttgagggggtatcattccgtacatggggggactaggggccgaggtcgatccagggcttgaagaaggagacatctcagtaggtgggccaggtggagggccaggtggagggccaggtggacggccaggtggaccccctggaccgagtccgccagatgagccaggtctttggccgggagggccgccagcgaaccgacccatgaatttaaacatcccaggacctggcctccagttcaccccgcctgccttcagggttctcaattttcgcttacggtcacggaagccaaagtctgtgacccgagcgagcagcagccacagatgatctgcggagccgtatatggcatctaaacggccaatacctgctcgaggtgggcattggccccattgagagtaaggcattctggtttaccgatgagaaaatcgcctgtctagtagccaaaggtgtagacttacaataatttgtttccgccgataaaactctggaatgcatcttgcttcgcgtaccaccagtatagatcgcattgaatccggaaaacctcaatgtccttgcgggtgaaatgcttcttggagggcagcgtaccctcttcattgatacctccaaaatcgtcgtaattcactgcttgtcccataatggcgcctatgagatcttcgtcgatgctttcctctttctcggagaagggatcgtcttcagagacaccagacatcccccaccacgagttcgaccagcctgactggcgtcgctgctcgtgagatctacgtcgataggcccgtagatctctcgtggtcttggcgaaatcgatctctcggatcaaatgggtggacccacccaggtggttattccatttcgagtggtcggcagatatcacctcatagtagcccagtagaagagtggcagccaaggtaccgacttgtttgcgtcggagaggaagaccaactgcggaactaactcgtttcagggcgtagtgatagtgcttcaaagatactgtcgtgggagcttgctgtaaataggcaatgtgtaagctgctgacagccagtattgcctgtaggagagctggatgctctaaagctttgagggcaagcgtatagacccatagaccctgctgtgcagatgggacagccgctcccagaacaattgaggagtcagtaggatgccgttcaaatatagacaaggatggaccagtcgaatgaatgaagtgagcaaagatgcgggcagtctttgggttgttcagcggagaagagccaagtgtaggacggtatgaggcaagcacattgggctcgttcaggtgagtcgtgaaggatcgaagttgttgctcgtcgcggttagcagaggccataatgagactcagctggttgaagccttcggcctgcgattgatccaccatctcatcatccgagtccacgtcgtagtaatcctcgctttcatcctccatgtatatcatttgttgttgatggggtatttgatagggtatatattgctcatgagatcgtaattgctgcggtaattgccccagcggtggctgataatgatatatcgtcggtagcggctgggtcatctaagaaatcgtactcagcataccagttgctaaagacagagataatgacaatacatacctgaggaactaggttggtctcgctctccctccttccatgcatcgagctggaagctagcatgggcgagagattggaggcgtattcttcagctgtctggccgatcggactggcgatctggggtacattttgtacgcttgcatgggaagtatgtagagcgcttgtctggtctaactgaactgattgctgtccttgcgagaagtcagtcacatttggcggaactagcgtgttttccgtttgagctatcggctggatgtgccacatatggctcggtggctgcacatgagctggataatagaaggagggtgtattaatgggctgtagttgagccgacgaatgcatttgggacggaaatgagggatatcccatcacggctggatcagcaggtcgaggggctagcattggatgctgagcagcagctgccgcttgttggggagggagttcagagccatagtcgttgggcatcggccccctcatatgttgttggtctatctgcaaatcgtggctgtggccattattgaatgatccgaagaggcctatggggttcttgaacacgacccgctgggcatatccctcgcagattcgcttggatttcacgcagttggtacatattggcttctcttcgccgcacttaatccggcgctttcgacaagctatgcttcgtcaatgagggaaccctatcaccagtgttctgcaacatactcaaacagccagtcttggttcgttttttcgggagtctgcggggaccttgtccggttgaggttcccgcagaaccgccaacagtaagatctgctggaatatccagctgatccttcaggtcgtcagccataaccttggaaggactcaagattgcggagtggacatgtgcgaggacattgtggggctaaaagacacaataatcagataagtaagaaacagagctaggagggaaaagctgccgagcaacgcagatcacccgcgatacaatgtggttcatcaaggggggatatacatatttgcaaggttgctcttaacacggtcagactgctaagtgtccacggatattgacatttataattacaacttacgagacgcttaggggcgtacaacgttgtctttgtggcccaagaaagtcacactatcggcatacatcagtgcctgaggcaccaatgtgtatgtaatctgatagtaaaattaccgataacgaaattttgagagtttttttttggaggtaccgtttcccctaccttaaaaggcattggacatttacaaccaatccttcggaactaactatgttcgctgttccaggatggtccgttgagagctctgctctgaagtcacagactcaagccgcacagcctaagaacgactctcagccggagaagaatgcctccaacgatgcgaagaacaataaacgcaagcgtgccaatgaccgtatcactgcgggaaatgtggatgagatgtaccgtagacacatcgagggtacctccaggagtggaaagcatggtgcagatgattctgtgaagccagagaagaagcagaacaaggaaaagaagcagaaacagacacttgagactgccacccaggagactacaagtgaaactgccaccaccgccgatgccgatgccgatgcagatcaagccgaggataaagcacccaagaagaagcaaaggaggaacaggaagaacaaggacaacaaggacaacgcagaggacaagatcgaggcagacggcgctaccactaccccagctaaagaagctcctgccgctgctcctgctcctgctcccgctgcacccgcactcccaccaacatcgaacctgactcctctccagcaggcgatgcgacaaaagctgatctcctctcggttccgccacctgaacgaaactctctacaccaccccctccgcgaaagcacttgaaatgttcagtaccaacccggagctgttcgacgagtatcatgccggattcgcacgacaggtgaaagagtcctggccctccaacccggtcgatgactacatcaagactatccgcacccgcggtgcaatccccctcccaaggcgaggaaatcccattaaccctgctaagggctacccgctccctcgtcgtcctactggactatgcacattcgccgatctgggctgcggtgatgcacaacttgcgcgcgccttgacgccctccgccaagaagctgaaaatcaagcttaacagctacgatctagcagcgcccgatccactgatcaccaaagccgatatctcgaatcttcctttggaagatggggcggcggatgtggctattttctgtctaagtctgatgggaaccaactgggtttcgttcgtcgaggaggcatggcgtattttgcgtggtgatggcaagggcgagtgctgggtcagtgaggtcaaaagtcgatttggaaaggtccaacgcaagaagtctcagatcggtgcgatgaagcccggcagcaaggcagacaagaagaagcccaagaagaagggcggcgccgattctgatgacgatgaggctgatatttttgctgaggatgcgcgaccgtctgacaatagcgatgagactgatatctcggcgtttgtggaggtgttccggtctcgtgggttcatgcttcgccaggaatccgtggataagtccaataagatgttcgtgagaatggtgtttgttaagcagggtggtgcgcctaccaagggtaaacacgcttcggctctcactgcgcctgcccctggtaacaagaagcgctttgtcgaccgcaagcctgattcagagtctggcatgtcggccgaacaggaagcccaggtgctgaagccttgtgtttataagatccgctagacgttgcaccggatctttttatatgtcattgtacataaccaaaatctaccacacatgaccactatgtttgtggatcatatcccgaatgcaacatacgacgtagttagaccagcatgtaagcgttggatggcatcgtcattatttttctattgctcccgacataaatactagcctccaaatcaagtccaaggagcctcttcgaagatatcttagacactgatcgcccttattggttcccaccgagctgtgtgacagcttggcccatctcctcatcgttgtagatacggaaacccttctccttggtgacactggccaactggacgttcttggaatcaagcttctcctccatgacctgcttcagtgtcttgagtaccaacgtctcggcctctgctagagtcaaagaccgatgatattcattctgcagctccgcctgcgcaccttcgcttcccgagccgatggccttggcatcataccggtagaatgtgccggacggttcagcgtggtatctagcagaaaagatgagtcagtgaatatatcatacaaaagaaagctgcatatcttacagttggggcccgtcctcgtcataaccagcgattaacagcgcaacaccaaacggtctgctcatgacactctcctcgtcatcaccgctctcaccaaatcgcagagccaaatcgcaaattgcctgcgtagtgctctcgacccgcagaggctcggcatagtggaaggcgtggttttggcactcgactcgggcgtgctcgactaggttgcgggcatcggcttgcagaccggacatggcacagccgatgtgctggtcaatttcaacgatcttctcgacggacgacgcttcgagcagcgtggatgtgacgcgcttctcaacaccgagaatcacgccctcggaggttgctacctagatgagtattagaaaaaacggtttcataatcgcattatcctgggtcttgcgctccgataacagtacaaagatcactcggtgtagtggtttgaggactttcttgaaatcgtagagcaaagaggaactgagttgtatgacatactccgatcgcggtggagcctagtttgatagcttcaagagagtattcgacctggaacaaacgaccttcgggggagaaggtgctgcggaggggacattgtcagactgcgggtcggtataagagcgcggattgttatcggagaacgtacttgattccacggtctgtccatagctgttagttgattccgcggtgaggggagaccctgatgaagcttaccatattctgatcgtgcaatgaacatattggattatctgatgggatgggagagacttgtcaaaaagagaagcaatgaagcaatatagaatcacgatggaggagataatcagttggaacgaaagaggagcagaggtggatgtcttaagtgaagctcgggaagggaagctctcgacgtacgcaagaggtgaggtgcctggttgatgcctttgtgcctgaggcaattatcggcccaaaccaaatgtggagttgtttggatacttgcatcttctcctcatatacattggttctgctatttttgttgctgatttttcgatctcgcgcctttcagtcgcctatgctgcatgattcaattgtcgccctcgcgggattatgtctgccaatgaccgcgccgcgtatatgaacgcttcacgaccccgcgcggtctccaatcgcgtcgattccgaaactcgcggagcatcgccgttacagatcgagaataaggatcccttgcgccgcagcagctcaaatcaaaaacacagagcatcccgagatcagaagagcatggccgataagcgctcagaacgcatggtaatcacatcacgggaaagggcagtgcgaaggaaccctgtgaaccctgttaaggaatctatcaatgcggctagcaggggcgattgggataaaactcggcccaggaagcctgtccaacttgatgacgggaattccagtttccgaactggggagaaagacctggctgattgtgagtgctgcgtcgcagtttctcgtggagtgcaatggatttgctgaccatgatttttctctttacagcaccatggaatccccaagcatcattgattcctcactcgacagctcccctcgcatgtcgtgtatcagttcctcctctagcttcgacggctccgcaggcccttcatcctcggccacttcgagagctctcacccgatgcccaggaggcggcgatcttggaagacttgttgttcgtgttcatgggattcgaaggtcaatatgttcactacgctagctcatacgacccatcaatcgagaaagaccgcctcacgggcccgatcttccagatagccccaggcctggacccgaccctccgtgatctcatccagtccatgttgaaaatggctactcactacagtgccatggaggcatttgtggaaattcaaagtcgcgctgagtgtggtgctgtcagtcactcactatgcgcatctattcgaaagctcctcaaagattacctgatccttatcgcccagctcgaaggccagctgctgaacaatcctacatttaccttacaccttctccatctctacacaatgcctaccagtcaatgtttatctcaattatattcgatgggccaggaactgttgctcaaaaatggtcttctagatgaggagctcgaggagtcgactgatgacttcgatgaggatgttgacaatatacttgaacaactcaaagaagggggggacttagtgccaggttctatggcccgcaagaaaatgtgcaaaggaggcaatattctcggactcctaacagggcgtctggcttcattctcgggtgatccgatcactaaaaccttgcttcagaccttactgcgtgacgccagtcggccttacatggctatgctaaacgaatggttgcaccatggcggtattagagatccccatgccgagttcttggtcaaggaacaaaaatggatcaaacgcgagaaactcgaggaagactacacggatgaatattgggagaaacgctacacgattcgcgagaacgaggttcctcctcagctgaagagcgtgcaggataaagttctgctggctggaaagtatctcaacgtggtgcgtgaatgtggtggtgtcgacgtcagcaaagaggtcaaagatgtaccgaagacgctcgacgatccacgcttcttggacaacgtaaattctgcctacacctatgccaatgcttccctgttaaatcttcttgtcacaaaaaactccctcactactcgattccgctccctgaaacattacttcttcctcgatcgctctgattttttttcctacttcctcgagcttggtgcttccgagctacgaaaaccggcacgtgccgtcaacgaagggaagctgcagtcactgttggatattgtccttcgacagcctggcagcgttgcagcactggacccgttcaaggaggatgtcaaggtgcggatgaacaagatcggcctcacgaaatggttgatgcaggttgtgaatgtttcaggcgtcaaccaagagggcgcggaagcggagaagcaacaaggttctgctgtccattccgctgatgaggacaaagatattcttggattcgatgcgcttgagctggactattcagttccattccccctatcactggtaattagccgtaaaaccgttctgcggtaccaacttattttccgccatcttctctcgctgcgccatctcgagacgttgttggtcacgtcctgggcagaccagaacaaaaccatcagctggcggcataaatcctccgatcgacggcttgaaatatggaaacggcgggcgtggaacttgcgcgcgaagatgttggtgtttgttcagcagcttttgtacttttgcacggctgaggtcattgagcccaattgggtgggtctgatggatcgtgtcaacagcgttgacgccgacgcgtcggaggtggaggaaaattatatgaagcaggtcaatcgaacggttgatgagctgatgcaagatcatgtggatttcttggatacctgtttgaaggagtgcatgctcacacaggctaaactgttgaaggtacgtttatccatgcaggcggtggtattcatactaatagctatatagatccattcgaaactggtgacttgctgcaccatgtttgcttcctggactgcggcatcactttcacgcgccttggcttcagccgatcctgacttggctggaggaaaagtccctggcgctgatgccagaggatatgatccaacgcggattggaaaactcgaggacacactgaaacgatacgaggaccatttctcgcgccatctccgcattttgatggacaggtgagttacacccttaagaaatacatctggttatgtgttctaacacgactatacagcttgaactacttcgccgcaacggagagtgtggtgctcctgaagcttgcacattctttgacctctattagccgagaggagagtaaagaggattgaaagcttgcaatgccttgctccgtgtctttcacaccttgatatcattatccccatatcaacccccgacagagatgcggttgagtgctctggttatgggcacaagaagcaaagcgcttcagacccataatgcttgctcgctgccgcctagaacttggtgatgccgagacatatgccacggacttcggattgtggattttcgaactccgcagaattgagacattcaccggactctcccagacaagtccaaatgggctgtatcacactctatcaagcctcgtctgtgggttcgtggaaacccagatcactgtacttagagccatgaaccgagtcacaccagacatcgggattaatgataatacgagtagcatttcggaacgaaacccggacttacagcgtgaagtgaagtgtataacgaaatctcccaaatgacggagcccgcaaattcctcgggatcgcgtcagcaagcggcttctcacgtcagccggatttggccatccaagaccgtcagggttcttattatttaatttcaatggaatctctgagatatttgtaaccaaagagaaataattaaacacctacgggactccaacaaagccgatcgacgcaaacaccacaaacatgccaataaccaccctcacctccgtcctccgcatcccattcccgcaccccaacacagcacaagaccgcctaaccttggccctcggcgccacagcgctagtcctctcgaccctcgtcctccccgccgcctaccgcgactacaaaatcttcaaatcctacggaccgggcgggccaccgaacaacgcgctaggatgggtaatcgtgcgcgcgctgttccagccattcgggcgcgaaatgttcagcacggacgagtacgtgaaacgcgttgcggcagccgatggccacgggaagggcgatgatgggtttctgtttttgtccgaggagcaactggggagtcgacggggggaagagaggcctgttgttggaccgcacgttgcaccgcagaggcagttgacgcaggtaccagataatgctgttatggaggtatgttgcgtgccccctttttttgatcagaaaagagaaggcgagggatgaagagctacttgctgattatgctcttgtgtgatagaaattccgtgctgtgttcagcgccttcggacatcggaaccatcacctcgtgaaattccaaaagtccaatctggaacgccatgctgatgggctctttgtcgcggatcatcttcctgtattcggaattgcgaaaactatggagcgggagattgcacatgttcatactggaaatgaccactcggttcatgtgattcttgcgccagctgattgtatgattttctcgattcattcatttgttcgcgtgctaacattccttaggtatcaaggttatcgaggctggttggggccagcgtcatgctttctcgggtacatctgcgatctcgtttctttcgcttggtacaaggcctgatatcccggtggagtatgttttgatatatgcgccgcggacggaagcggagattgagacggttatgcagattatctcagcgggtgtcgagtttatgacggggagagaggatgtgcggtaggtcaacgagtgttttttggactgatcgtatacttgaagggagtaatggtggtgttctaaggtggatgcattcttcttccggtgtatgggttgtgcttggtttcttcctgttctctgtctagctttatataccctcactcttcgatttatagaaattcatgctgtttatatgagcatgtggcagcgccattgcttttaattgagactagtacattctgctgttggtgatgcatgtataagctgatgcctcaactctctctatggtatactcactccagcccaagagtgacctgcaataatgtaccttctttgccctggatgagtgctgacttagagaactaaaggtgaacacgttctttcccttttgatataatctaacctttctcatggcctatctagcttctatacaatttctcaatgtacatggtgcaaatagaaaacggaatcccccgcctctccacttttgcaagctagtagtagataaccatgtaaggcctctttgcttctgcattcgaggcgtttagaattaatcattggggcgaatgccctggaatggctctatggatatggcattgtatcatctactattgttattttggtggtaggagtatctggatatatatttgtcatatttgttatgtacactatagttatgattagatagtgaatattatgtgtagttctataccgaggaatctgccgaccgtcatgcgatattaggactatatttaacgtttttctctcctctgtgctagtatcttaaatagtaccacggcgacgcctctacccaagtggatctatagcgcgattgcacgcatatggctagtggaaccgagggagtggtcaagttcgtatttagtaggtaagaaaatacacatatccacccagcaaatgagactacgaatgataattatcttttctttcattttactactccatacgtatcattgtaaaaggaaatgtgcttggcggttgtcatgcccaatttagaatggggcaatgaacccgctaggagcaattccaaaattacccgttatttcccgacttacatccgacgtaggttccgatactttttttggggtttcggaaaaaggaaataggggggacctttgaagtacaggaatgatattgatctaagagctcccccaggttgaagccgaaaaagttagtaggtggctcccttacccgagagatgaaccatggcgctgggttttgagccaacggcggagccggacgggtaagcccttgtcgaaatcccgacagtatggatcttcgtatattgtactttgtatatgtaggaatctttcttccttgcttcgacctgaagagtctttttgacacgaacttaaatagtgctcggaccacatattcttgtatggacccgaggtataagcggcacttgcatggaagtaacgcgttgacatgtcgtcatgtaactcagtgttatgtgagaaataaccacatgcaagtcttcggaatataccccacgaccgcaactgcaactacaacatacgaaccttgcctttgttatggaccgttgctgctgccatgtgggacccgatcgcctcggataattgacctagagtgaagaaaagctagcagtacctgcacttaggcattaggccagttgaaaataatttcgaagatgttttctctcggtgaactcggacaccgaagtggatattgccgacgttgttgtgttgtgttgtatgttgtatgctgtaatgtaatattgcatactccgtatcttctcctaaaggcaacaaatatccacacacgggatgggtatctttcccgctgcccatcactcgctttgcaccaaggcaaacaaggtgaacgggtgaagaatccagaagagggcaacggtaatatcgatcccttgcctcggaggtacttctgtcatattgttctgcagaatctggagacgggctaaaaaatccctgtagcaaatctccatagtgtccgccacccgggccaacaacgttgcaatcttgaaacgcaaagcctccagacaagcggtgagagcgagagtgaaataagaggggcaggaataaaatcaataaaatccagtgtccagcccatctgaatcccgagggaatggatgccataacgaggaagttgctgatctcgtctgtcgaaccccactcaatttgaggggctgttgttggggcaatttggggcgtgagattggactgaaccagccactttacacccacagtactgcacattgggccaaggacacggggcgtggcgagtgtcagaaacccgtcaagccgttcgatccaactgttggattccttgtttgcattccttcacttaagtgacagcgggaaccgacggtgatccgtttccatgcctttggaatccgtgatgtagggctcatttggcctgtacaaagtacatacgcaagggctggtgtgaactccgatcccacgggcttttctttttgtccttgttctcagtcggctctctcagagccaattcctaaaccttttgttctccgtatggtgtctcatgtcgcactgcggctgtgttgtcattgtttcaacctaacgacgaattgttgcatagtttgcttcaatcgatgggtggctttttttttcattcttcaccgagttcttgttacattcttcgctagtcaacccctagagacccatggaatcatggcgagcagcctgagcaaggtgcgattcaactttctgtagactcgaagtttccaaggttaaccgctcatgacagccgcggaattacccacatattacccaccatgtttagcaatgcaacgattctttgacggcatggagatcccagtcttatgggtttagttgtggccggatttgtactcgatccacatcgtcgggcgctcttggaccctccaggaaagtaggtactatgcgagacggcgaactgtgcattagttgacggcaccgccacctagtttcaaggttcgttagcttggctttgagcggaaccaagtcatgtctattctgatacttacctattctggtgtcaatagtccgggattattcgtgaactcttcggctagtctaccgacccgcattttttttctttcgtcaagccttgttgacgtaccagtgtcccggagcagcaacaagagcctcccgtgaagatgtctcacgccatgtttagtagttccgctagcaaggatgtgtgttttggagttggccccaaggaacgacatgaacgatccggaggggagttgggagtccgcattgatcgtatttggttacccatgcaggacccatccgtgccaaatcttcgcccgttaagcacctcgtgtcttcacaaatccagtattgcatctggtgtgatctttaaaagaggaaattcgattgggtggaccgctggccctcccatccgcacaatttggtacgtcccttgtataattagaagcccctccattcagccttcgcgagcagacgcccaagagcgaataatcctcgcgcgagccgccatcctctccgagggtaccgccgacgtcttcaagcggcacccgatcgctccaatgaaaaccccagcacatcaatgatcaaatctcactcctttttcggatattgtgattcgaagcaagatcttgtcctcgggcaattcaaccccgccttggccagacaaatcaggatatatcagctcggatttttccatcatccacaacaccactcgattcagggtgacgatggcgtatgctagttctctccgttctttcgggccaagggcaactgacgttcatggccgccaggagtcccgattctgaaacgatagagttagaccgtgaatacctcgatacggtcacagtccagggccgtgagtatcagaaatattcgatcgatcatcgtacgtactttggaccggtcgatgaggtaagtcgtccagatttatgtcgtgggcttctcactgataggctgaaccaggaagaagcacaacgactcgaagaccagcaacaagttttccaaagaattttcgataatcgtttgatcttccccccaatccatcgactgaaaagagttctggactgtggacatggatccgcatcctgggctgtggatgttgctgagcaaaaccctgactgtgaagtaagatgtccccttgactgcgcccgacgacatcctaatatttggtgtttcataggtcatcggcgtagacattgcccctcacatgagtccagacgacatgcctgacaacttatggctccaggtaagtcaacctcacatttcaccacggggtacggtgtggtttacatcatgaaaaggcttgacactgcctttgactcatgactttgtgcttcgggacctctgtgtgatctgtcaatcttgaacaacagttctgtccaaatgtgtaacctcctgaaagacattcgctgacttgtgccgaataggtcgatgacttgaaccgccgtttcacctttcctgcaaaccatttcgatcttgtccactctagactccttgcgaccggtatcaaccgatcgcgatggccatcctatcttcttgacatagtcaggtgcgaatactccagagcaggttgaccttgccgacattccaagaggcagaatttctccaactgagataccaagactaacgtcagcggtaatcaagggtactgaagccaggaggctgggtccaaatggtggaaatatacttcaatgttcaatcagacaacggctcaatcactgatgagcatgctttgaggagatggagcacaaaatacatgcgtgctctggaggacaggaaagatcttcggatcggatcgaagctgaggactcttatgaccgaggcggggttcgtcgaggtagacacgaagatgattcctcttcctctgtctgcgtggtcgactggtcggtattggctacccaagaagaacgaataagactgattgaatcaatgcagaccaacggatgcgagaaatcggccgatacaattgtccgaacatgcagcaacttctgcgatcacttgcactatatccattgactcaacgcttgcatatgtctccagatgctttcaattctttggtggaccaagcgcagcaagaagcagcagaccccacactgaaggcatatttcccactgtaggtattgctccaatatgaaactgagagacaaattctgacagagtaggtatgtttgcattggcaggaagccatgaagacatctgtctggggagatcggcaggtgcaatggctcataaaagcaacctctggcggaagggggaaaaatgctcgcaagacaactgggccggttatcgatgccacccctcacccagcatatcgtacagctttggttattttgctgtgcgcatcctgcattaacatgtcgcattagcggaaagatggttagttgaatgagtgttttctaattccacctgttctttccttttgccgtttgtaatgcaacggggattcgtatcaataaccgtcgctgtatgctggctgaagtccagcggagagcttgagaatctcggtatgattcatcgaaagaggactgcatggtcgcacaagaacgagtgagacgactccacggcgagtggagtgagagaaagctcgtagtccaccgtggtttctgcgggaagccaacaattcgcacatgcatcgagtcttggctttaagagcctcgtatccactcgatatcggtgttggggtactgcccaacgcggtgggaaagcgaaggtgtattggatggaacacggggtcgaggcatcgctaccgctgcctagggtaagttgagcttttagttgactgctcccaggcaaaatgggagtgaaacgaaacaggagagggttttgagcaggaggcctgggggtgcagattaagctgttgagatcgtgcctagtgcgggatacccgacaccgttggctcccgatccgaccttaccctttagagaagggggttttcgacctccttacactccaaaagatacacccgatcagcaaagtttgtcacgacaaaagatgaagaacatagaggaagatgaaacaggaggggacttaccgaactgacgggagagccagggaaccaccgacttccaggaacacatgatttacacccatctcagacagtatatacggtttgactgacctcaatatcaatactagctgttaaaaatgtccataccgacttgacaattagacagcttcgcgccgtcacgccatcacgctctcaggccttcggagcagactctcatgttgagagtgataaccctgggcgacgagctccctcaagccttaatgaacatccacaacatccgttacacattaaagagctatcaatcttgtgtcttaccgatattctcaatggccgcaggagctcttataaccaacaccctcttcaccgtgtttcccgtacggatgtacccaatcataacctccaagcaaccaacaactaggaatctaagctgcatatcgggatctaactagcgctgaatccttgctgatttgttgagttccttctttccttactcgcgaagcggccatgtcgccctcttagcttcttattagagttcctcccggatgcccctggcgacgctagctcgaggagttgcggtatgttgattgccggaaagacccacagaagctcgaaatgcataagctacattctcttctcttcatgagtgtgttggggagccttgaggcgactattgggcacagatctaccgagaatcttacctatcgcagtccttccaagattctgattggtctcctccaggggctctaaggccaaatcaaccatgaaggggagaatccagactagacagcttgcagtttcgattagtaccatcaactagggaatattggtgcttggaaagactgtactagtcgatttatgccgaagacttttcttttgtctgatattcttttgtttgtctttcctgtacggagtacctgagaccaaattacccctactatatgccgataatgagtgaccaccaacttaaactactcttaaccatcgttgtaatccttatacatactccgtacgcagcagaaattagcgtacagctagctaagaggaagatactcaggcttggccccgatctagatgtgttggtgcctgaacttcaaggcatgaaatcctacccaatcggggaaagcggggagaaaaaaaagttggcgcggattttcatttgagctccggaacagtcgcccattctttttcctatcaagtcaccaccaacaagatgccttcaacacacaataaggaaaaggcctgggatacggatgacatcgataagtggaaggtaagtccaaagctgtccttcttcgattaaaaaatcgctactgacggatcctcgcaacagatcgaagaattcaaacccgaacacaatgccggaggcagtttcgccgaggagtcatccttcatgacactattccccaaataccgtgaacagtacttgaaggaagcatggccggtgatcacacgagcgctggagaagcagggcatcgcctgcacactggatttggtcgagggtagcatgacagtgaagacgacgcgaaagacctacgacccagcagcgatcatcaaatcccgggatctgatcaagctgcttgcacgaagcgtacccgtgacacaagcgatgaagatcctcgaagacggcgtggcatgcgacgtgatcaagatccgcaaccaggtgcggaacaaagagcgattcgtgaagcggcgacagcgcattctcggcccgaacggttcaaccctcaaagcgctcgagctgctcaccggcacatacatcctggtgcagggtaacaccgtggctgtgatgggtccgttcaagggactgaaggaggtgcgacgcattatcgacgactgtatggcgaacatccacccgatctaccacatcaaggagttgatgatcaagcgtgagctcgccaaggacccgacgctggcggaagagtcctgggaccggtttttgcctaacttcaagaaacgcacgctgtccaagcgccatgtgccattcaagatcaccgacaaggagaagaagacgtacacgccgttcccccctgcgccggagaagagcaaggtcgatttacagatcgagtctggagagtacttcttgtcaaaggaggccaaggagcgcgttcacaaggaggaggttgtcgagcgacagcgtctcaagcgggacgagaagatgcgcgagcgcgagaaggatttcgtggcgcccgaggaggtgacgccggccgatctcgaggaaaagaagaagaagaaggagaagaaggaaaagaaagagaagaaggaaaagaaggaaaagagcaagcggaaacgcgaggccgaggaggatgtcgacgccgacgaggctgccgagcgcaaagagaagaagaaaaagaagaagagcaagtccaaggaagtctcttccgatggggaatgatctgctctttgattgtggtatcggtatcttgtatcggaattggcgcttatggcagtgcataggtctggcgtttaaatgtcttgtctcctggttcttcgttgcaacgttgcaacccgtgtacgcagctggtgtgtacatttacaaaaaatattgttcaataccaagaaatgatttagtctacgcacactgtcggaatgataattctgtaaaaagcatagacctattcatcggaaaacgacagatgtggctagtctagccttggtattctcttagggctgatggccgttgaaacgatgaggtccgtcctctgtatgtctttctatgaatcgtgatatcaatgattgtcgtgtatgaatgtcctctttcccatctatttgccaatgcaattgtgcatgtatcccaaaaggtatcggagtatctccaaaaaccgcagtgtctatatagacaaaaaccagaaaaggtcaaccgcccataacagatctgaagacagtagttcagactgccgcggaagtctcgtcatcagaggacgaggcgctggcattcaggcgacgcagcttatccgacaagaacctctgctgctcttcctggctcttctttaaatcaacaccccagaacagaatcaaaaagctggcaacgctcaacccaaacaagaagtagaatggcaacgagacattacccgacgggctcgcgtcgataattgcacttgagacgatgggtccaataaaagatgaggttttaccgatgatgctgaagagactgaagaataggaactcgtgaccgcggggtgtaacctctgaaatcataatttgcgagtagctgtaccagggacagatgaaaaggccgtagaacgcttggtagacctataatcaatcagtcagatattacgcatcatatggcagagcgggattgacatacccagacttcccatgcatgatggaagccgaacctctgggtccagataccgatcatgccccagccatcaagtaggatgattccaacggcgacggcgttgaacatagttttggttccgagcctgaagcgttgctggattgtccagaatgcgtatatgccagcaccctaagagagatttgtcagtttggaacaatttcgctcgcggaattagactcacctgtgcagcaatgccaacaataagcaggtatgtcagttccagagtattatacgaaacgatgctgttctgcaaagttccaataacagtcacagtggtgttgagagagtctccaagtaagaaataacctattgccaccgttagccccgtataatcacagagatagtaggataaaaagtcttaccaactagatagcacagactctgctttaaatgccagatctgcttcatagcatgccacagctgccacatgcctgcaacaaagatcgaccgtttgccagggtcttgacccggacggcgtttctcaagaataaaccacggaatcgagacgagcaaccacacaccagagacgaatgcgatcagcacactcactccccagttgttattagtctcgctatcattgaccttcaacccgaacatgatgcccacgataatggccaagataaagatctctccaacggactgaacatagaaagcgacattggcaagtttgctgcgcatcatggtgtccgcatagtcatattcctcccgagtgatgctcccggccacatatttgtcggcctcttccttcaattcgatggagttgcgcgctaagcccgggaacgcagcggtccagaaagtgagcgtggtttgataggcgatcaagcctaccatgtatagacccacgccgatacgccacttatccggggtatggacacccaaccagccgaagccaatgccccaggcaataatcgacagcgcaatcaagatgttgggtcgccagtaaccgaaatcggcgaaactgccgattatgaggaacaccacgacttggatggcgaacgagattccattggagaggagcacgatgctgttgacattacgtggtctaccgagaaagtcgagtagtccatcggcagggactgcctgggagagcaagttttgaaaagcagtcggtgcgaagtctagaacggggtcagctcctgcctcaatattagattgggaacgcggatagacccactgaatagtgacaagccattatttccaatgtaatagctgcaatcgtggtttagtttccacacagggtcaattcaacaagccacgcacgcataataagcccagatttccgtccgggtcgtgcgatatctctcgtcaaatacatccggtgcaatcgggtcgtcgatcttgttttggggaagaccatccacctccacagtggaatggatattgtctttctgttgatccatgactgagaaagataaaaggtaaaaaggacaaagaaagaaagaagaaaaaaaaagcgacggaattggacgggttaaatgaaaggcctacaaagtcgccccgcgtgctaaagccatcttgagatgaaccagttgcattgcaattacagtgccgatcacgataacctggatttagtaggctggactatatcgcgtcgggtctagttagggctatcacttgcagagacttgaaaaaagttccggcctctccggtcttgaagtgcttgactactttatctcgtcctatcagatcgtcggattttgcatcttccgcatttggtgggttaggtgggtttggtgggattcggtggcttcgcgaacggacatcgaatgtctcagcgccgatattagggcaggcaatgactagctacggtgtgggagtgagaatattgttctctgcatccgggcagtcgctagatatcgaaggattgaagctacaacataaaatggcgtggagcccgagtgaatgggcttgagaataaggttgtcggtgtaaattgtatggatacgaggagttaagaggctagctgaaacataactggacagtggcggtgggctcatatcccatcaacagtccaacttcaacctcgcgcgtcatatatgagtagaaccttggaactacgatatctcgtcactaagcgaagaaaacagccctaggctagatggactcagacctaaaatgtcgggagataagacttggaattgttacttttaatataaaccatgttataacctcagaagtataattctagacaggagtaaacaaaagcaaaaaaaaatattacataaaaccagccgatcaccgaccatcaaatgacagactatagtataggtgagtgagtatcattcaaccaatcactccgaatcgcccaaggaaaacgacacgcttagaaagtgaaagcgagagcgagagcagcaaccagggcaccagcagcagagccggcgacacgggtagcagagctgacggggacgctcgaggaggcagcggcagagtcggaggaagaggagctggaaccagatcctgagccggacttgctgccaccagtggcagaagcggcggatccagaggcagtgcgagaggcgaatccagcggaagcgctcttggacttaggcttggtggagggacgggcaccgatggtcacaccaggggcggaggcactgacggaggaggcagcaggagaagagccggaggcagaggcaccagagccggagccagagccagagttggaaccggagccggagccggagctagagccagagccggagctggaaccagagccagagctggagccggagccggagccagtggcagaagcaccggagctggagccagagccagagccagagccagcggtagtggtggaggcaccggcggtagcagtcttgccagcggccgaggtggaggaagcaacagcagagctggaagatgtggaggccttgcagctcaggtcgtacagaggggtggtgtcggtggatgaaccagtgacaccgaagctaggggcggtagtaccggcatcctcgagaatgtaccaccaggtgttggtgttgcccaacagggggcaagcaacctcgtcccagtactgcttggcgttggcgacgctggcgacagcgaggttctcggtagaaccggtagtgggccagccggtctcggtgatccagatctccttaccgccggcaacagccttggtcttctcaacgcccttgttgaagagggacttggcgtcgtcaatggagttggggtcggtgttctcgtagtaggggtatccatcgaaaccgagccaatcaacggcctcaatgacggcagagttagagctgttggtccaggagttccaggtgtcgacgtggccaatgggggcaccgctcaaggaagtgccggagatggcggagcggacctgggtgatgtagtcgacaagctcgtcggggtcgacaccgagaccagcgttggccttgacaccggtgacggagttacggtaaagatcctcactgccgacggagataccgacgaccaggtctgtgaagtcatcgccgtaggtgctgatggcagatgtgagggcagcaatctcgttgctcatgtcaccgccggaagcccagagacccaggagaagggtggtcttctccttgatagcggcgggaatggctgagataggagtgttggttgtgtcaccctggatcatggtgtacagacgggcactggtgaaggcgttgtcggttccaacgaggttcttggcagttgtaaactcggtctcaaagtcggattgggtcttgacgctgccatcaaccttggtggagccgtagttgaaaccctgagagatggcgtcggaggtagcgacagccatcgcgagggcaaagaattgagcggaacgcatcttgaatgattgaaaaacgagtgttgatatgggagtaagtgaaagagaaagagaggaagaatatatgagaagaacctggattaaaggagtgcaaccagggaagttctgtacagttaagatgaaggtagaagtggaagaagaagtgaaagtgggaaatgcaaacggaacagaagtaaccctctaaaagccctcgaaagaccgaaagcaaggttggttctggccatgaaaattcagtctagatttcgccacaacgtagtttagtggatcgaagtgggtccagacacgttggcttgtccactttaattctatttgccgccctgccattggtggaaccaccggtggactgattccaaaaatatgcatgagaggtgggtctcgatgaatcccatgggtcccgaggctgcattcgatgattttgtccgatctccccggatctttccatccggctttggaaagcttttcgcatttgaagatggagaggaataaaaggagatcccatttgtcgcagttgctatgtacagtagtgggtcacagacaccttagaatactaggtagaccctatgcaaaggaatatgatagagacaccttggtggagtaccgtgtcgttgcatgatcgaatccaattcattccctggaaagttccatcaggggtttactccgtactaatctcccctatattgttctacggcaacacattcggtctattattaacccacccctattaactaagctcaacccgtgatactcccccgacctcattgatttccaaccctttgtacggggtcatttagaacgatctgctctcgggcaatccttcgactttactccgtaatgaggtgtgattatagattaattatgggccggtagggggcagggcgttgtctcaacgctgtgttgtcgattctagatgtcgaacaatggcattcaatttggatttttctgtatgccatcccgttattattgttccctaactataactgactatgcagatgaccccttgcaggatattattttgatctaaccacaccggttagaacacgttgtagtgcggactacgtgtagactactctgttcttgcccaagtcgacttgaccgatcatacctgctcttaagatggccaaaaataggtattcacacttgtgttcgaggtcagcagcgtaggtacctgaatgtcttacccagcgactttggccttgccgatctttgcttgagtcaaataacattcattattccagatgtatgttgtaggtgagggctatgaatagttcatagtagattccctattcagctcgctcgacaaatattttccatctacttcgtacttcgtaatccggaatggatgggttacattcttcgataggggcctcaatgtccgcccaaccccaacacgagccttttaggtcatttcagtccagattcacattatagtctcgcattgaatcgagtgattggtagtccaataccaatttgttcatcaatatttgttatatatgattaggcatgtattgttcactgtagcaaaatgcctgctatcggcgataaccaactagaagtggggtaattacccacggggacctagggtaacatcgaaggtgtctcaaatcccctttctctacgcccatctgaaaccatggcaattgacgaaaaggttcaagcggtcttgaacaaaacggtcctgcgttatcgcggcccaggaggtgccatcgccgtcgtcaaagatggcgaggtcatcggccagcgtgtctggggattcgccgatctcgaccagcgaattcccatgacagctcaaacgcaaatccccatctgttcaattacaaaacaatttgtgtgtgcgttgttgatcgacctggagcgcaatccaaccccaacactagctgcaaagggcgatgtccggaagcagctctcagatcacctcgccgagatactaagcccggagctcacttctgacggtgaactgacaattgatcgcttatgcgacatgcaatccggcatgcgcgactactgggctatgaccacactatgggggtccaaacccgacgatgagttcctgatagctagagactgcggcccactgcttgcccgaaccaagtcattcatgttccagccgggaacggagtattcctactgcaatgtcaatttccacgtccttgcccgaatcatcgagcgagctacgggcgagtctcttgccaaattgctcgaaaagcggatactccgaccggctggtatgagcacggcattcctttgccccaacaccgcacatcacccaccgccctgtgtcgggtatgagggcgacgagcagcacggcttcacggccgctgtcaataggatggaatggtccggtgatgctggactagtggcttcactcgctgatatgatcgagtacgagaagtatctcgatcgctgttacgctgatccgcagagctggtaccacaccgcgatcgctgctccgaagtttaaagatggcactcctgcaaaataccgttatgggctagatcacgctgacatcgctggcgtgaacaccattggacacggtggagcgttgcgagggtatcgactgcatcggcgacacgctccacgcgagcgtttgtccgtcgttgttatgtctaacagtgacttcggtgcattcggccccaatatggagatcctccacgagctcttgggaatacctaagcctgtggcatcaaccgtccagccggccgcggactgggtcggcgcgtttcttgatcaagatactcagctgtcgattgtcatcaccaagggcgcgcgggatggagaggtggctatcagatacgacgggtcggccgagcctatcaagcttagtgcaccgaatcatgggaagtccgattccatggtcgcgacgattgatggagattttttgagtattcatcgtgtggtagataaccggatactcagtgctcggcgtattgtcccgaaagagtcaatccttaaagggacttcattccagggtgtctatcactgtgccgagattgaatctaccttccattgcattggcgaggatggcatgctatatggtgcgttcgatggatatctgggtcaaggaattgcaactcccatgaaatatctgggagatgatgtctgggtgttgacttgcccacgtggtttggatgcgccagctccgggagactggaccgttgtcttttctcgggatgagcatgatgcaatccaagggtttactattggttgttggttggctaggaaagttgactatgtgaagagagcctgaggcttttattctactatgcagagaaacgattattcatgtccttgatcatctgtcccttcgtatatatgaattacacgcagattccaagatgctagcggctgacagcgacgcactaaaaagtgtcaaaatcgcagtcgtatttagtgcctacatataaaaatatatacagtatcaacggtccttgtcagaagacactttctgcatgcttaatgctcagaaacaaagatacctgccatccccatgccctattcaaaacaattagtatatttcaatactcgaggtcgtgataatcgaaggtaacttacagtgcccacacacatcgaagtcacagcaatccgcttatcctgtcgacgcagctcagacagagcagtgacgacctgacgtgcaccagtggcgcccagagggtgaccaaaagcactttgagacatcagcacggcgtccatcaaatctggtcggagctcacttacatagcaccaccacgcgggttcaccttggattcatccaagcctagcttgttaacacagtaaacaccctgtaataacgagtgttagtcttgcttaatgtatagtcacatgataaacttaccattgaggcaaaggcctcgttaatctcaaaaatatcaatgtcatccttgctcaggttgaacttattcagaatcttagggatggcaagggatgggccaatccccataattctaggctccagaccagaaacagtagcaccacagaacttggcaacaatcggctgaccgagctcctgggcgcgcgagcgtttcatgagaaccagcgcagcagcaccgtcggtaatctgactggcgttaccaccggtggtggcactaggggcccactgcgggaaggcagcgcggaccttgccgagggactcaggggtcgtgccatagcggatgccgtcgtcgcgatcaacgacgatatccttcacctcgccggtcttgggatccttaatttgagtcttgacgggtacaatctcgtcatcaagccatccggccttctgggcgcgctcagccttctgaaaactgttggcagcgaacctgtcgtgctgctcgcgcgtgatattgaactggttagctacattctccgaggtctggcccatgggtagggagttctgggatgcgatcgggtgcttggcgatgcgctcggacatttcaggggcgccgccgtcggcgttcttgctcatgctctcggctccaacggccactccgacatcgatggatccggcggtgatttggttggcgatgttttgcacggctagaagacccgaggagcaaaatcggttggcgatggaggccgctgctgttacgggatagcctgctgccagcaccgcggagcgggcgacatatgccgaaccggggcagaggacgttgccaacgcagacatcttcaacgaggttggggtccagattggatttctcgcggacggtcttcttgatgtattaattactgcaattttcgcctctaatcacggaggaagaagtaccgtgaggagtgaaatgaggaggtcatctacggaggtatctttcaatccacctttgcgggccttggtgagcggcgtcctggctaggtaagtgataacctgccgattattgattaattatggcaatgaagttgcagctgcaatcagtgacataccacatcatctgggttctttgccagaagcttctggcgggctgagccaggagctgccagctggttggcgacggagcttaaacgttgttgcggtgaagacattgtagggtatcaagcagaattatgaatgagctcaagaacaaaacaaagagaaacccgtttttaatattcgctgcagatatatatctcttactaaaaaagaaccgcggcttctccagacatcctccactccgaggactctcatcgtacaatttgagccgactggaagtgccgggactttgggggtcacacggtgtatgatactgtaatttagcgatcctcggcttgtaatggaagactgtgattggtgagtttgtggattcgtggacgtttcatggtcccacatgtacgtgtactttggcttcaatgttgatcaagggggtatgatattgagagagacattggagaagtcaaggatactctcatatcttgtcattagtaccttgatgtgacctcatctccgaagaacaatcttgaagccctagaagaagtgttgagctctcaaaaccggggaaatcttaagctttcccggggagacctcgggaggattatgggggatttcccatagaccccactgtgaattacattgtaaaaagaagatcctttggtatgaacggcagatcaagtctggctagcttccgttattagggctatgcttgggaatctttatatctgttgccatgccagttcctgagagcttcgaattcccactaggcagagaatagggagacacccgttggaaaggaatcactcattttatcgacaaattgacttgacaagtgcttgactagaaggaaatcggccttctctctcacaatggacattttctctgaagtcagcgcgcctgctgtagccatggcatccgccttgtcggtggccgctggtgcttatctgaatgcgaagcttgccattgccactgatctgcgaacaatatacggcgacaatgctactacgaagcggctaaaccagcgcatttctgagctcgacggctcaacaaccatctacaagatactcgagcgggcggtggaggttgaaggacgggctgccaccgatgcgctctggtttgagcagaagacgtggtcatacagtcaactgaaagactgtcagtatatgcctctgtcgggagaaaacatctcatctgattgctaatgcgcctgtctgtagtggtcgatagaatggctgctcttttgaagagccgtgatatcaaccccggtgatacagtaggtgttttcaccaccaattcaccggagatggtcgtgactgtgtatgctttgtcaaaattgggtgctgtagcagcaatgatcaacaccaacctgcgaggtttgttaactatgcaattctaatctggaagaatactgttgacattagtgatagacgatacttttatccattgcgtcaacgtctccggctctaagttgatcatctcatcagcagatttgtctcaagatgtctgcgtcgacctaccacacttcacactcaacctggactcattcgaaggtgccgaaacagatccagtcgagctgatctcctcggaaactctgcagcaattctctccgtcaggacttgcagcagccaagcgcagcccaaaagacccctccctcatgatctacacatcgggaacaaccggaaaacccaaagcctgcgcgatccgcaacatgctaaccttgatcacctccaccccgctctcagcggacgccaacaacccctcaaagtaccacccattccgcgtttactctcctctccccctcttccacggcacggccttcttcaccggcctatgcaccgccctcggtaacggaggcacattatgccttgggcgaagattctccgcctcacggttctggaaggaggtacacgactcaggtgcaacccgcatactctacatcggcgagttatgccggtatcttctcgtaacaccgccatcaccgtacgaccaggaccacaagtgcatcgtggcgagcgggaacgggctgcgcggggagatatgggagaagttccgtaagcgcttcaacgtgcctgagatccgcgagttctaccgctcaaccgagggggtcgccaaattcgacaaccacggtgttggagcttggggggcgggcaaagtcgggttttctgggcccatccgccgcttcttggaagatgatactttcgtcgtcaagtatgataccgatacggagatgccgtaccgtgatcctgtcactggattttgtgtgagggctgctctcggacaggagggtgaggtaattgggcgcgtccgggaccgtgggatgatgattgagtacctgggtaatgagggtgcgacggaagagaagcttctgcgtgatgtgtttcggaagggggatctgttccagcggactggtgacctggttgttcaggagaaatctgggtgggtgaagtttcaggaccgggttggtgacactttccgctggaagggtgagaacgttagcgcaggagagattcgggaccatatttgccggattgaaggtgtccatgatgctgtggtatatggtgtaaagttgagtgggtatgtattcgggccgtcttgttctttcgttttggtgagatcgcattactgatagtctccaccaggtatgatggtcaagctggagccgctggtatcacgctggtatccccagcagatgagacagaattgatgtcgaccttgtacaaggcactcaggaagaagggtgttccttcgtacgctttgcctcgactggtccgacttactgagaagtaagcattcccttgattgcaataatttggccgtggctaatcaaattataatatacagggttgccacaggtgtcactttcaagcaggctaaaggtgatctggcgaagaagggctggaatcctcgccagcattgtggcggtgatattttgtactggttggatggcacaaagtatcaaaagttggaagaacaaagttgggcagagattgagaatggcaaagccaaaatctgaaccttgactcttgataaatccgatgcttgtcgtcttgttaagcaaccatacggatacccatcatagactcggatgaacagaagccatattgtatctgtcgcaagcaaatactaataaggttttagtaggtggatctattcaagtgggtccaatacatccgtccatgggaaatggatggtagcgatagtggagtccggggatatatatccatgatgctgtgtagtagttccatcatagactttctgcgcggacattacaaatgccggcgaaggaatttcagagaaggacattactgaaacgttgcttctgcattggctaaagaactgcatcgtgacggaggcctggtgcaattttgttctctgcgttgagatgacggaagtagccaagcaaattagtagtgcgctggagctaagcagtccatcgaaatctataaatttattacctgcaaagattaatcactgaagcatcttccaatgatggatcctctattcattgtatcttctatagcggccggatactcataaagttcgaaggaatactaattcagattccgtagcaagacgagaatggctttagactcctcctacgacgagtcatcgccgaataaaggctgtacatacacaagtacctattgttcaaggtgtttctcgactcatggtagcttattaggtaccccgtaatatttctgacgtcatctttagagaacgcgggcgaagagctttgattcgcctagaagcgatttctgcgcccatctcgctctttttcctgaactcatttctgaagcaagttaagcgcagcatgaaacttcttcgtattagtcgaccactgactttgattcgtgatttcactctaatattccggggtacaatctctgaaaggagtattgagaataacaatcaccttggccttagtgcggctatcctagtggccttttaaatgagctcatcgatggtcgatccgacataataagatgttttcttgtggtggttgtggcccacccatgtcaagggatactcatgacttaagtcggatgttcgagtgacgggaagttcaacaactaagtaggacagcatccgtagcttggaatggatgtcagtctagaaatgagatgattaataaaaatccctggcatgtttaggtgctgtgcctggcatctggatgccgatcattgataaagaactggagttcgaagtacggagtatctatagtgggtcggatcaactccccacctatgttgtagcatgagacgaatgttcatgtgtagtagaataagatgaaattacggactgatatagagatacaatctctctagcagggattcttgtatccctcagccacaccctgcaggtacatgaggcgtagaaccatggggctacagaaacggtatagatctgccgctgggatcacgtgtggaggcgtcatcaagtgactctctttctcctcaccccaacttctatctcctaatcccaactccgcaccttgtctgagctggaacccactcttttcctgacattcgactgcacatacctgagtgacttacctttgtggccattttcccgaccgaactacaacggtcacagccatgaagttcttatcagccgccagcctcctggttcttaccgctcctcttgcaaatgcagccgcgttctctatctttgatcctacgcaagcttcactcaaggtgaccgataatgggaagtatccagtcaatggtgaaaatcccttgcagtactgtgccaaaccagacaattacaagctcgagatcgagtcggtggatctggcacccaacccgcctctaccgtatgtcatccacgaagagtgctctctaaatgtagtagatttaactagctaacactttggcgataatagagggcagaagttgacaatctcggccaaaggtaccttgctcgagagaatcgagaagggcgctaccgtgaacctggaagtgaagtggggtctcatcaccttgatcaagcagaccgtcgacctatgcgacgagctcaaaaatgtggacatggagtgccccctagagaagggcgagatgatcttgacgaaggaggtggaattgcctaagcagatcccaccggtacgttgtctttaaccgtttgatggttaagcaagcagctaatgtgttcattacagggcaaatactccgttcttgccgatgtttacaacaaggaccaggagcaggtcacctgcctcaaggcagatgacatcgtgttccacctttaatcctgtctatcttagacattgctttgcatccacttaccaggtggcatctctcgatttgctgaactgtcaatgtcattagcttatgtgcttgactggggttcaatcatccgcgatgctcttttccatgcccgtctcatgactacttcaatattcgcatctgttgtttcaagttctataacgctttgcagtacattcggatatcatttggattttctcatttctacgctctttgcatctattatatctttacagtcgtctgtatacacttcagcgagtacgactgtaaacgtgacagctactacctctgtctgtggctacaatttacaatcacatctctactgattacgcaacgtatgttaaatcaattctgtatacggagtaggcgcaaagagaatatatgtaaagggtatgcgaactcgttccagttgcgttgggtatcttccctatctgatatttccatgtttcctttccaattatactcaagcgccgacatcgtcaatgatgggaccgcaggtgttgtaaaccctcgaggcggaacggcgacaccaaatcgcgatttccctgctaaacgacaaagacaaagacccacataaagcaagcctactctccaaacagacgacggacacgcttgagaacactgtccttttccgggtcgtaggggtggtctttgctggggatttcaaggacggctgggaaaggatcggcgaatgcgtcgacgctatggcggatgcgttctgcgatctgaggttgagatacccgttagcgaatatgtaggcaatgagatgagagcgctgagaatagtgcaatctatggaaaagaaactcacatgctggttaatcaagagcacagcaatgtctttcctctcctgggtgaagttctggaaggcctgttcgatctccgaggtctcggtcttggaatcaacgacaaggaagtttctctgggagccaggtggttcggtaacatgctgtaaaaagagccagcacattaggatggcttctcatataaatgtcacagagacgtgacgtagatggggtagtgaacattatcataccccgatgcctgcgagcaaaagaccagtaaccgagctgcatgataggttgagctagttagctgggcgcgagcttttcgaagacgagcaatctggaagaagggtctttactcttcatcaccgatgacagcaaggaattgccgctcctggggaaccgagttagcgatcggaggggtcattccattgaatcgatgccaggtaccttgtatgttgcggccgataccgccatgacgaggaaaaagaaaagaagaaactgagatttccgagatacacaatcttcgaactggcagttcgagatggatcaagtaaatgacagatctggtgcagctgtccgttgatcgccgtggttatcgccgggagcttctcattacataagctgatgcaatttctcagatttcaatgttgtttactccagggcttcatcgtccgcaacacgtgcaatagctcttgactcaacagcgcctcacctttgatgtcattgaattatcttcttaactaagacgaagctgctgaggaacagcttccgtctactacgacccccgtcctctgacatgcctcgacttgtacgccgccgcccgctctccgagcgcatactagcacgcctgaacccgtatgactttctgctttggctttccgaggaatttgaaggtggtgattgggaccagctagagaaaaactgggcttttcccattggtattgcgctcaacgtgatattcctcatcgcgcgagcaaatagccgatccggtggtggtagcagggcttttgacgatgtgttcggcgaggacgatggcacatccctatttgggtggcttgtaagtcattcttcccggctttgtaccttttatgttgcctatcttttcacgagattcatgacaagctaatcggccgtggttgttctaggcctcattcatcatccatctgatggcccttgcctctacgggcaatgctatctacacattccagaagaagagacgctatcgattgtttgagaactctattgataacaacccggcgacaccatcagcacatcgtgtacgggttgattcaagccccgtgatgccgtctccgctgcgctacattgccaaggcgctttcaacagaaccggcacactcgagggcccaccctgatgcacagcgagatgtctgggagcttgcaatatgggacccttcgccactttgtctccggctcttttgcctcttcagcccagggcacgtcttggtatattggctgttccttccgacgcagctctcagatccacgccccagcgtgacgattgtgacgacgatcgttctgaccgctcttctgtccgtgcagatgtccttcatctcttcttcttatacacaacaagctaaggaccagaagattgtacaccaagaggtctttaaagaatatgacactaaatatgtgcaacctcggacacatccgttgatgagagatgttgggacgcagttctcggatgaaccaccaaagaccgaggaggagtgcaatagggttgagacttatagcccggctcacatcattaaccgtggtttcaagaccagtcccaaccctaattacctcaagcacgtcgacccagaaggtttcaccccagtccgtcagccaactgcatctactcccacctctatattccaaggcccacccacctacaccccgagcatgtctcgagatggctcgcctatggctcgaggcactagccgcacaacaatgcgacaaccgcagttccgatctactgcaacaacatcaacaggtgatggaggaagtctcggtgtttacagccatgctaactctccactgaggaagtccgcgacaacttcatttgatcgccgcttacaaaacaacggagactttgtttacaaggagcgtggtacaactcccttgatgcggagttccagtccgctgaagagaagcagtgtaccgggaggaatgaatccaggtggcccagccaccgtcaatagatcggataagctcaacactcggtactaatacgaacgaatgaccaattccatctccactagcatgaaatgtcgtcgatccagatacgtcagatgcggagtcttctccaagccatgtgcaccaatgacacaatagcagcacccttcgtacatatatcccatcgttaattgaggctatacccaatatagtccatttgacgttttgtttcatggcattcattcaggcccaccacgctggagaatgcaagctacttatctagagattagggtccaaggcatttgctttctttgtgatcgctcgattttgatctctgacttaattgacttcgttcattgtattaaatccattgggcggctatcttgcctcggagtccttaagtttgcagtccactacgtccactaagtctggatcgtgctttcttttcaacgttcagtcttcgcaacttccatgcacagatgatgcaatctatttttaacatgtgggaggaaactgtcattccagatgccggcgggacatttcaaccggcattcaccccaggggctggcattcctaatcaccgacctggcattccgataaaccagggtccggagcacattattcttacgcgttttgagcacgatcacctatgaagatctctcaatagccagtctttttggatcgccccgctcctctgagtctcatatcctctgactgtcgccgaccgacatacatctttgctcagaaaaaccagcacagggaaagaccactctctcttcactcctacacggcatgggctaggacaactagactgtgctgtgcccgtagcatttgccgccccgaccacaatcgctgccagcttcagcccacaatggacgatgctcatgtcaaattgcccgatggacacctggtgaatctctcaccacgatctatacgcccaggtgcgtacaaagcgtatcgagtcgaatacaacccctcgaaagagctctcggcaacacctccacctcgatatccgcaagaaagaagatcaccagaatatgccatctcaggaggcacaccggcaaatatatctcaactgccaaaagctaccaagctgcctgttccgaggagtttcactgagaggcttaacgataactcgagtcaaacgcctagtccgactgcacttcctaaactgaccccatccagccgctccctgggacggctcggtgatcagtctaaaacattggacaaaggtcatgatcaatactggagaaaaatccgggataaattggaggattcgccgttgttagcaagacgtgccaggagcaagggcagtgacaatagctcatctcctaactcgcacatctcccatcaccgcagcagactcccggcaagcactagccaagatcaaacaagcttccgggcaggtagtgcgccatcaggcattccggggccaaacactgtcaataccggtcccgcacaggggtcgaggaacgatgcccccactacccttcccgtggacggccaaaataaatggcggaaggaagacgatcaatgggtcatcttggatgccaccgaaacatcaccccagaaatctgtgagaacagacgcgacgagtggttccagccttcgatctcatccttccgtttcgccagtatccgccgaggacagttctatcaccgactgggaagaccgattcgttgtgaatatgccaactgcaaaagatcccaatcccccaacgatgacggcgcaacaaattgccgagtatcaaagaagcattgaaagagtacaccgggacggtggccaaatggcagacccgaacacagtgcctagtcgtaacgtgtctcctgagatcagacacaatcctagcgaacaaagaatccagagcccaagggaaataactacatatgatggggcatacgagaggcgtcaagtgccgatcttgtcgcaagaggaacattactcctcgccgcagcctcagcaaaatcctcagccggagcaactttcacagcctcaaccccagcaaccccagcccttgactgcatcgcaacgccaagtagccaaccactactacagccctgatgagatcggatataatcgaattagcacaatttgggaggaatcgcccccaaagctcaaggataagcgacacccccaaaacgccgatgggtcttttttagggtgcagggaaatatccggggagaagaatccagacgaaatcctcaggttcgcttctctagacgacgcgagtctgcatccactcccattggccctgggctccaagaagaagcaaaaggcgtcgaaggaagtgaagatagcaacagaccgagaaaccaccaacagagtcgaggagaccgtgatccttcaagaagagcgactgcagtcttctcagaattcgagacctgcccaatgctcgaagccgtcagccatgtaccaggatcggagtttctcccagaacccgtccccaatcccgcggacgaggtcacaggactcgagcaaggagaattatcatcctaccagcaatatatccgagcgatccggaagtctagaagaaaatcggggagacgacgatgtgttcattatcacacccactatcacacgcactatgattcccacgcccgacaagaaagcatcttcgccaaagccgcaagggttgcgtcgtcctggtggcacaaacacagtcaccgccgaggctatcaaagccgttcgggcaaaggcccagatggtctctacaccgtcggggttgcggcccgggggacccaaaatggatatcaagccaacagggcgtaccttgacaacttcccaaacgttgccactcagcagcacatccgccacactgaaagaccaagacgacgagagtcgaaaccaagatcatgcgcaagatcgcaatccggaacgagtagcaggtacaacgtcgaatactatccgtggcttcatccgtaccaccgggcgggcaaaaccttccgggctggccagatcatctacagatagccttgctacaatcctgcgcaacaggactgagtccctccgtacacgcgccgagtctctgcggaatggttcggggtcaccccagcgtgcgaaccaaaagcaatcgccaagtcctcaaccgattcttccgtccagggacaattcggaatcatcacgatcggaacggtcatttcagtccaaagaaaccccaaccgccacgccaaacaggcccgcttcgccaaatgggcctccttcggcaaacaggcccccttcgccgaacaagcccgcttcgccgtccaaaactgctttgacggaaatcaaacccgacgaaccttcagcacgaccgactgcaccaagcaaaccagttaagaaaaaggtgaccttatcagagggatcccctttgtcaacgaaacccgacaagcctcctacatcaaccaaaaagatctccgcactagcaaagccgtctaagttggataaaatccccaagcctacaaagacagccgtgtctgaaaagcctcctcccccgaagacgaagacccctgatacttcaccaaaaaaggaagtgcaggtcaagtccctgcctcgtctccagacctccggtaaagttttggaaatcgcggagctcgatggccttcaggtttcgagtcccaaggagtctcttcaatccaacattacagacttctctaccgatataggcgacatgcactccgaagacaagggtaactctgagggccaaggacccaaccctttggcgctttcacttattttcaatattcttgtcgttgccgtcacccaagtgaataaagctgtgcgaatgggcactgacaacccttacgtcaaatgtgtggccaacaacactttgaacatgaccagtcactgttggcatgtctccaaatgcatatataccgtggtgtctcgctaccgggccacaggaacctggcccaggcctcgcagtgaccaggctatcagtcggttcatggtggagcttcttcaagccattgtgtatctcttgattcttgggtttgcagccatgctaatagcccgtgttattggctacgttgttctcgtgagcagctggattgcatggtttgttcgaccgtttgcatgggccttccagtgtgttggtcgtgccctgataatgtaaaattagacagatatttagctctatgcttgtacaagattgtttctctgggagtctcgagtttggaagggggacgttcgtcgtttttggtgctttcgggtctttgtcctggtctcaagcggttctacctactcacctaattgtgtctttcgactgtattcctagcatatcattaaataggtctcaaacttggatattatatatggaatcattgctcctgtagtagtaagaatttatattgattttgatcttctcgacttgaaccctagaaacagaagccgaagacccatgttgaagagggaaataaaatgacatgtaacttttctcgtgtcccccaaatccggaattcaatcttgtgtatgatattctctctctttttctctctttcagtcaaaaaaaagaaagccaaaacagacccaactccgtcatcctggtgttgaatggtcctgtatggtagcccgggataatcttgcaaaaccaatgccaaagcagagaaaatagaaggaacttaaaacatataaagttgctttcagcaacatttttcatgtgtggaagtgcgttgagcaattctttttttcggttcatgcgaacgaggtatccatctagccgagcagcaactcggcgttttgtgagataaaagaagcattctagaaaaaagcaagaaccgaaagatgagaaaaagaaagcagaaggaaaaaggcagggctgggctaccgtgggcagttctagccgccactgcgagctctatgaaatgagaccaagcgcagaagaataacgaagacgataagaacgaaataggccgtaaaggcataattatgttgaatttttgttcttcttgcattttttggggccatccattcttctggattgtgctagtccaaacagaaaatatgatatagtccagaagagaagcaccgggcttggagaagaatagacccgagaaaataaaagaaaagccgatcgatgaagcgccattgttaaaagagacggggtatcggtacattatgttgaaatgaaaacgctgaggaagaaatcgttgagaggtcttcagtcgtgacgccataagacattgcaggggaagcccgagatgtgttggagtagttgtttgtatgggctgtgttatcgttgagatgagtgatgttgaattaggttaggatgttgagttgatgttatgagaggtttgcaaagatggcatacgaccgaggtaggggtcgagggtgtgaatggatagcaaccagttatgagttgaggaaagctgctctaattggcagcaacgccattttgctcggcattgccgttgtccaatggtaccccaggcagctcgacgttgagatctttgacctcgaggccattgaataattcgaagacagcgttagatcggtggaagtcgttgtcaacgatattgaccagataccagtcgtccatcacctggtgaatcagcttgcgactagggctcgctgcgtcataacatttggaccagtgctcgcccaagaggtatgcttcatccttccaggctaagaaactgactgtctcgacgattgtaggctggatgatctcccgtccggcaaagataccccatgtgagggcattcgggctgtcacgtgtgttggtcctgagctcgcccttcttgttagtggcgtggtaagtcaagtcatcgttcttctcgatgcgagtaatgagctcatcgatcaagttggagggaaccagaagctcaaggtaggctttctggtagacgaaaccgttcttggggccccatccgtgcacaggatggcacgacttgactccattgacagcgggctgagagttgattgtcaaaaatccgcgctggtttaggttgagcaaatcctcctgaatctcgcgcgcttcggtcgtgattggggaatcactccacggcagtcggtcgagcttgccggtcaagaacttaacaaagatgtccgaaatatccttgatcgattttggctcgccccaaagtttgatgttctgttcatttgtacccttcaggcccacgccgtaagcgtcgagttcaccgaatgcaggtgaacgagaatcggtccagcgaccgttagggtactcatcccatgtctgggtacgagcaacgtatgatgagttacggttgcgccagaatactggtcgcacatcctctgtccttcggccgaggccaagggagggccgccagggcagcgcacgttgaataggggaatcgtccgacgggcaaagatcgagctctttgagaaccaattgagtcgcctgagccaggttcatggtataactaggcattgttaggacatgtcggaacaccagaattgagaaaattagtggagccaacttacaaatgcaggtgtttgataccagctgtgaccaactgtctgcacatgttggcgatcagagtctttccgatctctcgaaccgcagaatcatcgttcttgaccggctcaagggcctccatccactcagaaggcaccttgaccttagtccagttggaccgacgaatgaaagatgcgtatgtctggataggcatgataccggggataatggggacagtgatgcccttggctcggcacttcttcacccattcgatgaagttatccgcatcataaaacatctgtgtgacaacaaaagagctgcccgcatcaaccttctccttcaagtggtcgatcaattggtccacatcggtattgtcatcggcaccctcgggatagccacccacaccaatatcaaagtggttgccatatttgtcccgtatgtatttgaccagatccttcgcatagcaaaatccattgtccgtggcctcccatgtttccttatctcgcggtgggtctcctcgaagagccagaatattggtgcagccagctttgtaggcagcttggagcgcttgatcaaccttctctaatggcatatctgtgcaagtcaagtgcatgcaggtctccaagccatataccgattgtgccacgctgaccatctcgcaagtcagatccgataagcgaccgccagcaccccaggtgatatcgatgaatgaaggacctaacccatgcatgcggtccatccggtcgtaaagattctgtacaccctgggcggttttaggagggaagaactcgaaggaaattccaatctttccttccgcctcatttttggcaagcttctctcggatatgcattttgttgtgttaatctaatatttgtaagtataccaacatgcctagatagtttccatcaagggtcttcgtgctctgaacaaacataccgagggcaataactattagatcttttgtggaactggaacacccgtgcagatgagacaggcttacttttgctgtccgagaacccgagcacaatccctgtgtactgtgacacctcaatgtctagtaccgaggaatagagggcaacggataaaacacaagaaaagaaatggagaaaagtgaataaatcaagaaattgtgaggctccaaggagagtgaaggagaggaattgaggaacccggtgagcggaacattttggtggacaacatttggcggggaaggccggccatcggaggcacgtggtttatttctttaaaggggaattaggggtccaattggcaggtgaaatcaagaaaaaagggcatagtataagggatcatatgggtttctttcgttttgaactctttatattagaaaataagtatcaattggacttttatagcagaaatccgtttctcagactttataaggcgcgatatgaagccataccgcctgcccctccatagaccggcaaaattttctagttcgggttggtttcgcaatttgaccttgttgactctttgacaacagcttcagttctctagagaattacctacgacacccccaactccaaaatgtcgactgtccctcccccttctgccgatcaggactataagtccaccctcctacccctcctcatctccaacaatgtcctctcgttcggcacctatgttctgaagtctggccgtgaatcaccctacttcttcacctcttccctcctgcacactgcaccattgttgcgcgcctcctctgccgcatacgctagtgtcttgtctgccgagcccttcgtcaccaccaacgccgacggcaccgctcagcccaacttcgatattatcttcggacccgcatacaagggtatccccatttgcgcatctgtcaccaacgagctcgctgtgcgggactccctgtctggaaagaccacttgggacaatgtgagctactccttcaaccgcaaggaggccaaggcgcatggcgagggtggaaacattgtcggtgccccgctgaagggcaagcgggtcgtcattgtggacgatgtcatcactgccggcactgcactccgcgaggctgtcggtatcatcgagaaggaaggcggtatcgtcgccggtgttgttgtcctgctggatcgggaggaacgtgtcagcgataccgagtccaagagcgccattggcgttgcccagcgtgatcttggtgataagatccccattcggtcagttattggtctccacgacctgattgagaagttgggtgatagcattggcgccggcgaggtccagcggttgaaggactaccgtgagcgctacggtgcccaatagacatcggcttgtggaatccgccaaatcaaggcatgatgtatgagcaaagacagcaggatggataccaggatattttggagttgctctgaatatattattacttgaacattacattacatatattcaaatcaggagacggacaccttccttatgggctatttgacctgtcctcgatcatatttagactagccagcagatggctttcccattggctcatcttgggccaatatgatataatggcaagcaaacttacttacactgttgcccgccaaggttccaggaaaacaggtgataccggtgcttaaccggaggtattcaaaatatactccaatcgggaaacatggagctgagtatgaaagcttcccggtctttagtttcgctaattatgtagcgaatatattcatgggtgtgttttttactctccgaatactttacctatgttatattccaacacacccctgaactgactggctccactcggacgccggaatcctcgtcagcaagacaatgttctatatgaactcgaaaaaatagattgtctggatttaagtaccttggcaagccaataatgagaattgcgcggcaatcgacacgcagcacggcagatgctaccactgctaagttgtttttaacaccgtgcacataagcagcaatacaattgcctcatccagaatgaactgggcagtctatatatgtagcaagatgtattatcagattctgcgctcgggcatatgtatctactgcgtttataacttgatcagtacatggttgggacataccttgacgtagtaattcctaaggtagcaaattcaatagacaacacgtttgttttgagcttcgatctataacaatgcggagatcaaccgctggatacatatatttcgaaatagtcaggttttttttagcaaccttccaaggttccccccagatccttagtgagacatctaattggtgctatgtatacccctactatatgttctacggcagctccggtgatatcccaatggctgtctgcgtttcacaaagagtaacagcgagaaccgagactattttgttattttcaagttattttcgagtcattagagatcacaaataattattgcttaactatctccaattgatacttcgagtggcggaagcctttcaaacctctctctaatgtagcatcacatgccatcttacacttaacccagatcccatcaacaattgaactgtctatatatattgcttcaactaccgtcctcctatgaagacctaggatagctccgctcaaatcctagaacaactaataattccggtgtccaacatggaagtcggcttgcatttagaaatagcagcatatttagttattcttcccttgtttagaaggcttactatagacttgaacaactattgaaacgacttagctttctctaggatagactatagctagcaataagtattagaagttcgtataaattagtacaaagtgcagagtacagggaggctcggaccctgtacacccatatactccatacctttatgcaggccgaataataactttgggaacttagcccaataagaaatgaagacaacttgtttttgtatgcactcaccactgagctaacctgttatttctctgatagatacaattctagagttgctgcgcgttagacggaattcctgatacaaatgttgtcttcacacatcaggactgtagaggcaatgttcgagaccatgtcgatgattcaatatcaacgatttagtactcgggtatgtacaccaactctcaagcaagcaaatttgtttagtttgtctagcgtcgagatttcaattggaccaaaataagtctcgatgtgtattccgcgctgctcgtgatccccgctactctagacactagacactatccataaggtagtctcaccgaatcgtcgtgatacctgtaaagcatggattactctattagcctcgtcgagccacggccattccacaacggccgtctcatgcagagatctatggttattactcgaaacctgagcgatggtgacgcctcgtaagacatagatattcgccgcctgagtcccatggtctctgtaaatagcacacagcgttaattaggatgtcaatcagcatgaggacagaactccgtgtactttgtatctttttgcctcctatcagctgcgccttcggctctaaccgttcattccgggcttcaaggagaattgtcgacgtagcctatgcctattttttggaaccagagagaacaccaggagactttgttggaagaagtagactgtggagtatcatactccctttgaaccacgccgagtgattttacccctactatctctcaaacattctcaggtttctcttatttctattagccattccgcagctctcgatttcctttctttccccaccttttctacttaggagagctcctatagattggagactattggtcatattctacttgatggaaaatgcttaaagtctctcgttgatattagtccttttttctcgtcatcaatacaccaccctttcgcaacccctgcgactttccgaaaaagcaaactgtcaattatatgccctgttagtatcgttccttttcagaatacccgagtggcaagatccgatttggcattggtacctgtcgggtatacgagcctctttctcatatccctttgaaggaattaatggacctgctaacagggaatgatgaaacatagtagctgttcctcggaaagcctagtcgggtcaacggtcttcctcccactctacttcatatccgacacatgctacgatcctaagtttctctgaagcggcttagtacattgtttgtcgaccatgaattggagatataaaatcccagtccttgctcttctcgcagctccaggaatcagttggccctacgacgagactctcactgattataacatcaacgaaaaccaaacagcgaccaaccccttagactactggggagaatggcccgaccacacctactttccttctccagaaaattggcgctttcctgtatatacgcttttccttgaccgatttgtgaacggtgatccaacaaacgacaatataaatgggacactctttgaacatgatatcaattcaaaccaaatgcgacacggaggtgacgtggctggtttgctggacactttggactatttgcaaggaatgggcatcaaggttagcttcatggatggaaccttggtgcatatctaatatcaactgacagttgaacttctagggactttatcttgcaggtttggtattgatgaaccagccatgggggtctgatggttactcagcgcttgacacgactctactcgaccagcattttgggacaattaaaacatggagaacagctataacggagattcacaagcgcggcatgtacgttatttttgacaatacggtctcaacgtaagtcttccgtctaaccatcttctcttattgtgtgacaagaatctaacagcactagcatgggagatctcattggatttgaagggtatatgaatacaactacaccattttcggtcaaagagcacaaggccgcctggaaatcggaccgtcaatatgttgattttcgatatggcaacacctacaatgagacatgtgaatatcctcgcttctggaatgagaccggataccccgtggacgagtacgttaattatgagctaggcgggtgctacgacagtgattttgatcaatatggcgatatcgaggcctttggtgtctatcccgactggaaacgagagctcgctaaatttgcatcggtgcaagaccggctgcgcgaatgggtgtctagtgtcaaaaagagaattattcgtcattcgtgtatgatcatcgcttctttcgacatcgacggctttcgctatgacaaagctacgcaagctactgtcgatgcccttggggatatttctgaggcgtatcgaggctgtgctcgccgtgtgggaaaagacaatttcttccttccgggtgagattacaagtggaaatactcttggctctatctttcatgggcgaggacgtcagcctgatatgaagtcccagacgcttgatcaagcctttatgatgacgaatgcctctgatccggattactttatccgtgaccacaacaagcaggcgactgatgctgccgcttttcattactccgtttatcgctccctcacccggttcttaggtatggatggcaacttggctgctggctacgacgttccagttaattggaccgaggcctggtatcaaatggtcctcaccaatgacatgataaacgcgaacactggcaaatttgatccacgccatatgtatggagctacaaaccaggatgtgttccgatggccgaccgttgaatatggcgttgaaaggcaacttcttgctcttttcatcacgacattgcacatgcccggcattcctatgctcctatggggcgaggaacaagcgttttatattttagatgcttcagctgctaactatatatatggccgtcaagcaatgtctcccgcgacagcttggaaaatccacggatgtttccagttgaattcgactcaatatttccagtggcctatcaagtcgggacgtttgggatgctacgatgagacagtcacgtatgaccaccgtgatccagctcaccccgtgcggaacattatcaaacacatgtaccagatgcgacaggactttggtgctctcaatgacgggtggtggattcagctactctcaaaccaaacacgtaacatatatctcccaggttctgacggagttgcaacagaaactggcatgtggtctgtccttcgcagtccatattaccaattgcaggatttgggagaaatgggcaatcaaacggtctggtttgtatatcaaaatgacaaccgaacggtgaactatgagttcgactgttctaaccaaactgccgcattaattgctccattcggtaccaatagcacggtgaaaaacctgttctatccccacgatgagttgacactgcaagagggtccagtcaaacttgggttgaacggctctgacgattacaacggttgccttgacagtatgaggcttcgaccatacgaatttagagcctacatccgaaaagagagatttgttttccctcgtcctatgataaccaagttcatacctggacatgacactccattgctatctgctgtcgcgccagatgaaagtgagtcagtggatatcagtttgttcttctccacagagatgaattgctctatggtgaccgagtcaatatcgcttgaatcgtccaccgagactggagaacggccttctttggaccttgccagtgttaattgtgggagtgttgaaccggagattacttcttggacaggacaaattccatctacttggtcttggacaggtaccctgactggtgtctacaatggcgtgcataaattgacagtgaacaacgcgacaactcccgatgggagggcaactaacgccgtcgaccatttcttgttccgagtcgggcagtctgataaccccatgatctttaccacggcaaattactccagcagcttgcttcacagccgcgatgatggtactcttttcattgcacaacatgcagcaggggcagataaatatcggtactctacaaattggggtagtactttcactgaatggctaccatacgagggaggaaaccataccattgaagaactgccttggtctggaacaaagaagcagggatgggatgggaaacacgttcgagttgagtactggagtcgccttacaggtagcagcgactacatccaagagggcgacggaccgggctggagtcctgctatccgacgtcggttccctcatctcttttttaatggacctttcaacaggtacggatatgatgccggcttggataacgtcgtgagacaagataccgatggcctatggaaattccgctttatgactgaatggcctgcccagggtcagctgaacgtctggggtataaaccccgataatcaaccggaccaaagttacatctacggagattccaatggagactcaatcctcgaccgtctaccgccctcttcgctaagtgtgacaagcataaacatcactcggcatccaccgagcccgcacctcgcttggaggattcaactcgatgactcaaatttgcagttcaagcttgttcctacaggctccaaatacgttcaaatggctctttttatccttctttgcattgttcctgtcattacagcgtcaacctgcgcttatgtgttcatgaaaacattctatcggatcaagttcaaccaagttggcgtgagtgaaaaaaagacgctcatttcaatggatttcatcaataaattcgaggtaggccacgtggaagatggacagtctagaaacccattcagacgacttacaagcaggtcaaacttccttcaaagtacttctgcttttggtaatcgcactgcccaccgacgaaaagttctgattgcaaccatggaatatgagatcgacgactgggctatcaagataaaaattggtggcttgggtgttatggcacagttaatgggcaaacaactcggacatcaggatcttatctgggttattccctgcgtgggtggagtgaagtatcctgtcgataaacaggcagactcgatgtttgtcatgatcttggggaattcgtatgaaatcaagattcagtaccaccaactgaggaacatcacatatgttttgctggatgcgcctgtttttcgccagcaatccgttatagagccctatccagcccgaatggacgacctcgacagcgctatttactattctgcgtggaaccaatgcattgcccaggcgatgaagcggtttccagttgatctgtatcacatcaatgactatcacggctcggtggcaccgttatatcttttgcccgagactattcctatttgcttatcgctccacaacgccgaatttcaaggtttatggcctatgcgaacacagaaagagagaaccgaagtctgttctgttttcaaccttgatttggatattgtcacacgctatgttcagttcggcgagatcttcaatcttcttcatgccggggcaagctatctgcgccttcatcaacaaggctttggtgccgttggtgtgtcgaagaagtatggaaagcggtcatatgctcgatacccgatcttttggggcttgagaaaagttggaaacctaccgaatcccgacccctctgatacaggcgagtgggatagatccttacctaaggagagagatattggcatcgacaatgacttcgagatccgcagagccgagctaaagcgccaagctcaagaatgggctggtcttaagcaaagacctgacgcggatctgttagtcttcgttggaagatggtcgatgcaaaaaggtatcgacctgatagctgatgtcttgcctggtgtattggagaatcgagaaaacgttcagctgatctgcatcggtccccttattgatttatatggcaaatttgccgcgttgaaactggatcgaatgacgaagctttaccctggtcgagtatgctctaaaccccagttcacggtattaccacacttcatcttctctggtgcagattttgcactaattccgtcacgcgatgaacccttcggtcttgtcgctgtcgaattcggtcggaagggtgcccttgggattggcgccagagtagggggacttgggcagatgcctggctggtggtatacggttgagtctacgactacctcccacctattgaaacagttcaaattggccatcgacagtgcattaaactccaagcccgaggtgagggcgatgatgcgcgcaaggtctgccaagcaacgattcccagttgcccaatgggtcgatgatcttgagatcttacagtccacatcgattcgagtccatcaaaaggaacgaaccaaatcccacagccagtccgctgctgctggtgcatataatgccatctacgggatgatgacgccacaaactgcgtcaacaagatcgggcgcatcaacacctccattacaaccctcaagtcgcccgggtattgtagggtcactacagcgaagctctataatctacagtcgtgatgcaagccctggattcaatgggagacctaaatcgggactaagtcgccagatatctcatggtgttcagccggtatccggcaccattgagcatcgtggtcggcccgacgtcgggaaagtcggtgttatcgaaggtgacgacagcgctagtggagcctctccagaggccgaagaaaatagcgacgatgaaatgatggatacctgctatggtgatgatgattattccatgccacctgaaggagtaggcctaggtcgtgcacaaactcctcaacccagtttggcgctcaccaaagaggctctctcggcccaacgcacgagtcaaagctccttgttggctcgttgcagcaacacgccctctagttcaacggcaccgagtactgtcgggacagatgatacccttatccccccttctcgtccatgggcagagccaggaaaccgtctcagtaatgcctcagtcttgtctgtcgattcggttgttggagagaagaaagacttcaaacttcaaaaggttgacccgtactttaccgacagcaatggcgagtactacagagtgtttgaaaaaagactcgaggaactgaatggggcgaactcagacacccaactctgcattgagcaataccttgagaaaagcgaaaagaaatggttcaacaaattccgtgatgcacgccttggcctccatcaaggatcgccagctgtctcaatgcatcgtggcaaagcagagacatccccgacggggtcagttgccaacgacgatgcgacatcccatgaaagtggtgagcgcgaaagaaaaggtgctccgcctgatgaattccttcttggtgatgactacgtgccaccaacagggctgaaaaaatggatgcaaatgcgcatcggagaatggccggtatattctctcttcctcgggctaggtcagatcattgctgccaattcctaccagattacccttctcactggtgaggtcggtcagactgctacaaagttgtacggaattgcgacggtttacctgattacttctattctatggtggtttttcttccgatactacaaatccgtgctcgttttgagtgtgccgtggatcttatacggaacagcctttttgatcatcggaatggcacactttgagcctaactcacacaatcgcggatggattcaaaacgttggaagtagtgtctatgcggctgcatcatcgagcggttccatcttcttcgccctcaatttcggcgatgagagcggtgcaccggtcaaccagtgggtattccgtgcttgtcttatccagggcacgcagcaagcctatgtcattgctctttggtactggggttcaactttgactaaagcaacgaacgcgggaattacggatgtgcaggttagcgtcaccaatacctggaggatgacgtgcgtataacattgaaatcttcatctcaaggatcggagagttgctaaccatttttcatagagcaatatgtacaccagtcgctctcattttatgggcgattggccttatcgtatattttggcttgccaaactactatcgccaaattcccggcaaagtgccatcattctacaaatctgtcttccggcgcaagattgtactttggaactgggtggtcgttattctccagaacttctttttgagtgctccatatggccgaaactggaattgtgagtatccattgggcagacagtttatacgggtcttcttccttcctattcctcgaattacgctaatgattatcacagtcctgtggattacccagcacgccagctcgtggcaaatcctacttctctgtgttgcattcttcggctttgtctggatagcagttctcttcctgctggctaggctatctaagtcccatagttggatcctcccggttctcgcatgtggtctgggtgcacctcgttgggcccagatctggtggggcacatctgggtctgggctgttcctcccctgggctggaagttatacctcgggagctcttatatcccgcagtctttggctctggcttggggtcttggatgcattacaaggcctaggatttggtatgattctgctgcaaacactgacacgtatgcacatctgcttcacccttctggtatcacaggtcctgggctctctcgcaactatttgtgcaagggccttcgcaccaaacaacattggcccagggcctatctctccagatatcacggctggtgcgggcgctttgggtaacgcttggttttgggttgctcttttattgcagctctcgatctggtatgtgcgcccttgtaaggatatgagaaccccgtctaacgtctagattgaagtggtggctttctccttttcttccgacgggagcaattatcgaagccctgatcaacagcgcatttgttttgctggaagtgggcggaatggattgatgattcaagctctgcaattgtggtttcggatttccttgcgtacattgatgatatagttgcgtgttgttcgagtggctgatttgctgtcaaacagaaatggcccgaagtatttagtgtctaatataatgatacaatatctgacaagcgacagaccgtggccacacctgaataaaagttgagacccacctagtgggacccactcatcctaaccgtaaaattctataaaataccttaatatatcctatttgtggtatactaactgaattgggaggtccttagtgatggtaaatgatgacgatggtgtgccaaaatggaattcgagaccaagaatgtctcggtgccatatttgcgacgtctgagatatcagttgacgactgggtgttcgccttggagacgatgcttggcaggacgaagcacgaagcaggaggggagatccgatctggcaacggctactagccagttgtacggagtagtatcagactcctttggtcacaatcacaatctcgaggtgaaatagaaagtgggaagagaataggtgataagggccagtccaaacggaatattcctcaactagggcatcctatccttcatttccttttccattttatgaatccgcctccacagtaaccaaagcttaatgagattagatcacaaagctcatacttcaatgcgctggtatatagacgcgaacgccactgaaagaataaaaaaaataaaagattttgacattcaggtcatcgtccattgtgacgatgagggtaaggcagagataaagggattctggcagctgcagcgcagagatatgggcaaaaatacgtgagcagaagataacaagaagtttgaaaatggggaagattgaattatcatagacatcagtatgattcaatagttgccagcagtttacagggtaaccacgacttgcggccgtttcccaattgggattagtctcacaagaaacacatttttagctcgctctacgtattatttacgctacaatgtagaacgaggaataattttttgttatataaagtacccacgatcataattcattctcgttgaaattcgtaggctacccaaattataaaatagcccatgattagcatagggcaaagcaaaacacaaacagtagccgcaacaagtaggggaatatgattctaaaatccaaacatgacacaaaaatgaattgccgcagtgccaagagccaaacccaggcacttgacaaacacaaagaacaacttttaccactcaaggggctcgttcttcacatcaccgcggttggtcttggggacgggagcggcctcaaccatagtcgcgccacggcggccacggcggaggtaggcactgccatccaaccagggggtatcgagggtgcgcttggcctcgaaagtgcggatcttggactccatctggagagtaagaccgatgtcatccaggccgttgacgagacagtgcttgcggaaagcttcgacttcaaaggcagtgatcttgttaccctgagcatccttgatctcctggttgacaaggtcaacctcgacctcacggccggcgcgggcctcatcggcgatcttctgcagagcaacctcatcagagacgatgacaggcagcatgccgttcttgaaggtgttgttgaagaagatgtcggcaaacgagggggcgatgatgcacttgataccgaagtcgagcagagcccagggggcgtgctcgcgggagctaccgcatccgaagttggggccggtaacaaccaggatcttggagttacggtaaatgccttggttcaggatgaaatcggggttctccttgtcgtcggtgtaacggagctcatagaacagcgcagtaccgagacctgtgcgcttgatggtcttgaggaattgcttggggatgatggcatcggtgtcgacgttggcgcgctccagaggcgccgcgatacccttcagggtggtgaacgggggaagaccggtgctctggccaccgccgctagcaggcgctaaagtgtttgtgtggggctcgttgtcttcagggaaatccatgacacgctcgagttcgtcctcgctgtcgggcgattcgatctcgggctggacgtcgaccttaggcgaggccttgccgaggacggggctggctacgatgtgctcacggacatcagcgagcttgccgacaatggcagcagtggcggccatggcgggggacatgaggtgagtgcggccctgggcaccctggcgaccctcgaagttgcggttggaggtactagcacagcgctccttgggggacaggatatctgggttcatacccaggcacatggagcagcccgcctcacgccattcgaaaccggcatcagtgaagatcttgtcgaggccctcggactcagcctgctccttgacgagaccagacccagggacaatcatagcacgcttgatgttggaggcaaccttacggcccttgaccaccttggccgcggcacgcagatcctcgatacgagcgtttgtgcaagatccaatgaagaccttgtcaaccacaacctccttcataggagtaccagagacaagacccatgtactcgagagcacgcttgcaagagtccttgcggttctcgtcctcgaagtcatcggggctggggacaacaccagtgatcgggaccacgtcctgaggagaggtaccccatgagatggtgggaatgatatccttgccgtcaaggaagacctcggtatcgtacttggccccagcgtccgacttcaggctggaccagtagctgacggcctttttccactctgcgctaccgtacttgggggccagaggacggcccttgaggtattcgaaggtgatctcgtcgggcgcaatcataccggaacgggcaccaccctcaatggacatgttgcacatggacatacgggcctccatgctcagtccacggatgacagatccgcagaactcaataacagcaccgttaccaccagcagtgccgatgacaccgatgatgtggagaacgacatccttactggtgacgccggcggggagctcgccatcaacctggatgcgcatatttttgctgcggcgggtaatgagtgtctgggtagcgaggacgtgctcgacttcactggttccaataccgaacgcgagggcaccgaaagcaccgtgtgtggaggtgtggctgtcaccgcaaacgacagttgtgccgggcagagtgaaaccctgctcggggccgataatgtggacaataccctggcgcttgtcgcccataccgaagtaagtgaggccaaagtccttcacgttctgttccagggttgtgcattggagacgcgaatcattctccttgatgaagtcaccggcatttttgaaatttttccgtgaagtggtgggaatgttctatccgaagaaaacctccaattagtcgcgagttattagtagatatgggattgaacatacgtgatcaactgtagccagagtgcagtctggtcggcgaaccgtgcggctagcgtttgtgagtccctcgaaggcctgaggagatgtaacctcatgaaccaggtgtcggtcaatgtagatcaggcaagtgccatcgtcttgctcgttgacgatgtggtcttgaaagaccttgtcatacaaggtcttgggttgtgagacggcagaaggcatgatggtggagagtagaaatctgctgggagagaggatataagagtacaagatttaatgaagagagagagcagataatagggagctctgatgaagagcaatatagtagtaaatagtaagtaccgagatctgggcaactggaatgggaatgcctgttatatttttctgcgctgaacatccgcgatgtcgctggagagcttcttgaggggcaaggccgatctcggccggtcagcggcgaatggtaccaattttattggccgatgtggtagcacggcggatggccgatatcggttggcgttggacgatccaaaaaggggaacgcggctaatcacgctttgtggcggatacccgtagaccgctccggcccaagtaatgcaggcgcgctgattggctgtactttcccaaggttccgcctccgatcggcccgccggtttttggctcgacgcttatacgcttagcactgtgaatacgcatccggggagcctcaatatactccttcatcggctgaatgtgggttgtatacggagtactccgtacgttgatctggcttctcattcgggagtcatttcacaatatcagatgcattcatattctcggaaacataactgtcaagttttttgaacttgttcatgatctaacgatctacctaaagtcaggtatcaaaaaacgccaatcctgtatatctctaaagcaaaatttcatcaaggaagaaagcacgcaagcccgctgcccataggctaccgagacgaagcgcccaggtcgaccactatcctctttccagacactgagccactccgcaaggtctcgagtgccgcattaataccctccaacccaccctctgcatgaacaatctctggcaatgtaagatgtgtcgattgcagaagatcttccaaccagcagaccatagcttcacccactgtgggggctgaatggaagagcttaataggcacagtgtgatattgtacaccgggattcttctctttgggcagaccagttaatccaaggaggtgggcgtggccatcaggattcagcgccttttcaagctgtgttgctgtctctcttccgactatatcaatggcatatcgcagcttgcccccggtgacaccgcggataatttccactgcgcgatcagggtcatgtcgatcgactatcagatctgcaccggactgcacaagcttggcaccatgtcgtgctgcatcggccacgcaaatcacgcgtaacccggcgagtttggcgagctgaagagtaatcaaaccagtcgttgttgaggctgcagtatgaatgtcagtggtcagttcataggtagtaacatcggattgattcttacctccccagatagcaacccagtctccgcgttgtggcttttctgagtccaataatgatgcaaagcattcttcatgtatgtcggcgggtatatcattcttattgagtttcttgatgatattgggcaaattaggaccgggcacttgtgtgatgagtgaaaagtctaatccaaatgagacacccaaagccagcacagcagcgacgaatgcgactccgacagaagctgaagcgtggatagatgttgaagcaggaattcgggcagcattgaagtcggtggcaatggcgtattcttggaatgctgctttcctaatatcccggtaatctgttgatgggaccatcacaacatcgcctacacgaagacgggatgagcctttggggacttgcagcacaaggccagccaaatcccgcccgttgatccatggcaggctagggataccaaagttgaatgcactgatcaatttatctgttagtcatgcactataactgcccagaatcgtacaacttacggtcccttccagtcgatggggttgaggccgatggcaagaacctgcaaatcaacagtcagcatctcgtgttatacaagatccggtggcctgtcgtaccttgacaaggatctctccctcatgcaaaaccgaaggaatggcatgatcatctaccagggcgtactgttcacgggcccccttgagaagcaagactcgttgtcttgccgcctcagaccgcggcgacgggggttcactctccgaccttgacacatcagagtaatctgagacagactccgaaaacagagtagtcggggtcttctgcaattcttcgacttggaggcaagtagaggtagtcgacatggtgcacgggggtaataatggcatggcttggaaggtagatcgcagagaaaacgccaacccaactattaggcttctatctatattgcgcttcgtcccagtctatataatctctcgggcgagaagataaagacaaagcacgcctcaatttagggcgcggggcagtggtccgaatccctcccatgagcacgtacatagggtcggagtacctccactaatcgcttggctctgagatttcttgcaagatctatgggataatttcgtctcacattcgcgcaatgaggacatttccgtacttccgggggccttattcgtagtcgttatccattgctcatggcggggcatctatggcgtgataaactagatggccgagggtcgatccaacgctcttatatctgccgaaagatgggggactttaaggattggaatgaccaaaggatctaatagaaatttgattggctatatatatgcaatagatcaatagagattgaatattctcgactctgttgaagtacaaaatcgaaaaattggatctcgaatctcgaatttctgagtttatccaaactgatgtgatcgcggcttgcgatgacgaaaactcgcaacctctagccctaagatgtcaacaccaaggacctgaatcacgaatatccggggcttctgagatctgttgagatattattttttattttatctatggagtacggaagaaattatttaccgacttaatccaacatacgtagttggtgattatggatatggaatatatatgtgatccctgagattcgttgtagctgtgcaacataagttgtaacagcatatccttttatagtgattggtacagtaaagctccgaataccacttgcgtatactagtcaggagtaattcgcgtctattttacgtacttatgttgtttagaatacaagctgggattcatagggtatctcctccatgttcccatgcatccatactcagaattccttggattattatcaattccctagatattaccttcattggcaagcattggcaagcattggcaagcctcttcttcactagacctaagaactctactctataaactttccaatttgggatattcgcctgcaggatttctgcccatctcctaagagtcccgtgcgagcacgtaattccaccgtagaacgacaacattgactgggtgtccaagctcgagccgttggaagctagacaggggtccagcaagacgaaacaaccagtcctttccgctattgccattcgcggagcagatcgttcggggcagtacagccgacaacgtggtatagacctcgtgggcgcgaaggttataaaccaccacaacgcctgtgaaaaaaaaaattattcactactcaattatatcttttatttcatcatgacgaactcagaaaaggaagctgtcccgagtgagaaggtggacagtgcaggttctatcacctcgcccgttggtgggccacataaaggtgagtttggaacaatgttcctgtccaacgtcgatgaagctgactttgaccctgatagtcaagtggtaccgatcgacattctacaatgccttcatcctcggtctttgcaacttcctcgcccctggaatctggggcgccatgaactctttgggtggaggaggtgaagagaaaccctacctcgtcaacgcagcgaacgccttgaccttcggtcttatggtcgtctcttgcttcttcagcagtgtcctcgtacgattcatcggcatcaaatgggcactcatcgtcggaacaatgggatacgcaccttacgcagcggggctgtacacaaacaaccgatttggcgtcgaatggctggttctcctgggcgcggcactttgcggcatctcggccggtattttctggatggcagaggcagcaattgcactttcgtaccccgagccatacaaccaaggccgcttcctgggattctggctcagcttccgtgttggaggacaaatcctcggcggtgccatcaacctgggcatcaatgccaatcggtcgaactcgggctctgtctcatacactgtgtacctgattttcattgcgctgcaggcactcggcccctttgctggtctgctgttgagcaatccctctcaggtccagcgaaaagacggagtccctgttaacctgcaggtgacaaaaagtatcacacatgagctgaagagcatgtggaagctttggatcaatcgcaagttcctgtacatcattccgttcatctgccaggctgtgtacacagaggctgtgatgttctcatacgagggattgtggttctcggtgcgagccagagccctcgggtcattcctttccggtgtggtcgctgtaaccatcggcaacattctcggagccttccttgacagcaagcgggtatccctgaaaaacagaactcgatacgcgttttacttcgttgtcgcatggcaaggcatgtgctggatctgggctacagtggtgacaaccgagtttaacgaaacacacccgacatatgactggtctactccaggcttcgggagagccttcgccctcttcctgttctgggttgctggcttccagctcaactatatgtacctgtaagttgaatctccattggtgactattcagtccatgttactaactgatcaggtttttcttggtgggcaaccttgccgatgatcaagaagaagtcgtccggattgcgggcttgttgcgtggaactgaatccgcagctcagtgtgtcagcgtacgtacacctcttatctcgcttccgtgcaacatgaatactaacgagctatctctagtacggtctaagcagcgtgaacatcatggccgcggtggggagtatttatctcaactttggcttgtgggctatcgcgataatccctacctggatcattatcaaagacatcggaacagcctttgaggataaaaagatcgctagagagactcctggtttgcgcgaggccgtcgatcaggagtaatttgtttggagcgtatactggcgcaaatattttaaaagttggtacagcacaagaacatttaatttagaatttggtgtatcaccttccgcgttcaaaatatatacattgaaatgatgatgcttttatgatgagcctgttcccggggttctcgcaacccaggtcaattttaaatctatgcgataaaaccgaactccctattatcatggtggaacacgagcaatgcaaggcgatgtctgacgaacagaccgagcatcccacaggcagtttgtactgcaaccatgtgccacgccagttggtcttctcgcattggacccacccacaccagccaaagattcaagatggtgagattactggattcagtgattcgaccattctcgtcttgggtgattcgcaccagtttcaaggtgtgtaataagcgtagtacggtatcgatgaagtgcgaaggaggactcgtccactccgtgactgaagcgtccagcaacccagtggaagcgtggaactttggtaaccgatgacgaggacaaggaatgagatggaatagttggggagtggagtaaaggaaattgaagatctgtggaatgaacagtagtaacagggttttgctgaaatgccctaggataccaaccacggcaaacaccattcctgcgaaatagcagtatgtatcgcccacaaacaccttcgacggataccaattatggcatagaagggctgccgacacaccgatgaatggaagcaggaagtacatcgacaataagtgcgagtcggtggcagggtgcgggtatggtgtcataggtgcaaggtacatcgcatcattgaatagcaattggatcgcaatcaccagtgactgagctacctcgataccattaatgcctgccaacatgttgatcgcgtttggacagaagattgccaccgctgccatatacatgtagtacagccatccaagatcgacaacatcacccaggtaaggttgcagcggcaccggcacgacgacttgagtgacgccaaagtcgacaaagtacacaatgagcatggggattgcggaaaaagcagggatgaggactttgtgtctccagcgaatgtcgaatagatcatcaccgattccgagaatcacaacggattgcaaagacagaagaccagaaaggtaggaggcgagctattcaattgcacattaaattgggtatgcctcagtcaattgaaatcagaactcaccttgccatgtggaaatcgatgaagaaatcggccattctcaatatgttgcgatggaaccacaacgtcacggtttccgcctccggatgtggctgcaacgatatccttgtagaaggcaaaaggaatgaacataatgagcgccatcagatacacaactgcgcagactgcacccatagtttcaggtctagaacaagatattagtacatgctatgaatatgatctcaagttcaagagccatatacatacatctcgggccggctaggctttgccatatccttgcctttaagtcctgctttcaaaaatacagggccgagccacctgatcagactaaaagccacagcaaatactatgccacatagtgcaattgaagcgactaaaggcgccccatcgccttggaacgtggcgttgagtatggctaaaccggcccccacgagtgccagtagacgccaagtctccttacgggagagggtgcttgggttattcatggcggacacacgaccaaaatggcacggacaaggcccctctgctgcaatgaggaattcacaagaaattcacaagaaattaacctatacaacaagagggaaagtccacgtcgaccgcaatctgtcttcattcttcgataagcttatcgtgttctgccagagttatcccaccgccaattttagcggtgagagggcatccccgtgatgcttgcgaccaataaaggtaaggcgacgtcaaccaactgtttcatacctcatacgtgcagatgcatgaaatccaaatcctcattggcccagatatttaattcgtcagtcttctagcccaagtccgttccgatgggggcaatggagcgccccgaggtaacggccggatttgccgacttcgacgctggccatcgggatctggtcaccgtcaccagatttaacttctatggcaaccgtattgttaccgcttcttctgatcaccggatgaaagtttgggatctacaggatggcaaatggcaaccgatagacacctggcgcgcgcacgatgccgagattcgcgatgtatgtccccaaagaagctagggccaaggctaccattgcggctcgtactaaactactattttaggccacatggaatagtcctttcacaggccaacacattggcagtgttggagaggatatgaagttaaaaatctggcaagaagatgtcacccagccattaaacacaggacggcgattcaagtcaatctatcgcatgactgcaccacaaaggcatccatttgtatcactcgactttcgcaacattgacctggagtcatggcttgccgtgatcacacgggacggctatcttatggttatggaacctgtcagccccgatagccttgcagattggcagcctattgaccagttccgtgtgtgcactgccccggaacgcggcgaggaaacaagtttcaaagtccagttccatcacgatcctaccgacattacccacactgtcttaccggagtccgatcggaagagcctgtcgctaattgtggctgccatggacaccgtcaagctctatcgcactgatgcaaatcgacgattctaccatgcagttgaactcaatgggcacagtggtcttgtgagagacatctcctgggccaatggttctgtgcgtggttatgatcttattgcgagcggcggcaaggatggtttcatccgcatctttgaagtgtacacgacaccagctggccaaacactacagatattcaacggccggaaggcagaacttcgcaagcagccccagtcgcagtcacagtcgccccgagcgacatcgcaatccgggatcggctctgctctagcaaaccgtgtgcctgcgtcggtgactgatcgccaagccagcggggagccacaatttcggcactcgttcaaacaggtagcttgcattgacaccaaacacctcgatgtgtggcaggtccaattctcgttttctggtgagtattctttatttattaattcaaatcttttcgctaatatactgccaggtgactcgttgatctcctcaggagacgatggaaaagttcggttctggaaaagatctttgtctggagaatggctcgagttcgccgaaacagacatggcgtctcagtgatgttcttccaagcactgcaagaccttattcgggattcttgaaaatgcccaacacttgtctcttcctacgctctcagccatcaggcccatttattttgttcgcaatcaatgataccctctacctttgatttttgcttactcctgtgatctcacttggtagtattagtggaactaatgtgctggatttaaggtcgatgtttttgctttatctgtatctccatcatacgaggaaagaacgatgttaggagatgccgtggttggtcccttgacaattttcctctcgagccaaaccactctccactctctatcctcgtgcctataactgttttattatctatattcattgttaattcactatggctgtcggtccgaccatcggcactggtttgttcgtcggcgctggccaggccctcgcggttggcggacctgcctcgctactcatgtcgtacataatcctatctcttttgacctttgccatgaccacgagcgtggccgaagtatccagtcacatgccatcgcaacatggcacactcgttaccaatggctacctgtacatgtcaagcagtctggcatttgcttcagcatacctccgctggtataccctcgctttgtttgttccatacgaaattacatcggcgatggtcaatcttggcctatggaaaccgggttccactatcgcaatcagattgactatcatcacgaccatcgttgttggcttcaactttctgccagaaagactcttcaaaagttccgagcgagtattcactatgatgaagatcggcacaatggcgaccctgttcgtgctctctgtggccctgggtcttgggggtgtggatgcacagcccccatggggattcaaatactggaaaactccgggtgccatgaacgagtatctagttcgaggcatatggggacgactcctgggtttcttgcaatgcctccttgatggctctatcgctttcacgtttgcccctgagctgattgtgcaccgagcggaaatgccagcatcactcgtgccagcatcacttggcgaaacaacgatgctaagcgccggtatcgccggtagagtcacgtccgacgttgctcaaacggcattgccgtatatcatgagctccctggccatgggcgttatggctcctttcaatgagacgcgcctaacgaacaacggaacaggttctgggctttccccttacctgatcggactcagtgatgcaaaaattcaaattgtacctacgatcgcgatgattgcaatcctgctctccgcggtggcttctgggcgatcctttttgtatctctcttctcgcacactttgtgcaatgtcagagctcggtcatgcgccctcgatatttgccactcgcaaccgttggaatgttccgtatttggccgttgtagcatccgccctgttctgctgtcttgcatttgcttccgtgaaagtgccgagtaccatcatgaacacctatctccttcgcctcgttacgagcgccggtttcatttcctcgcttgtgtcatgcaacatccatcatcacttcaatcgccggctccgattgaacaacatcaccaaacggtataatttctcttcacagccagtcggtacatacttcgggatgatcatcagtaccctactgctgctgggcggcggattgtgggcaggaccgaagggaaatattattgggtcccgagcagccagactgatcacctcatatgtcaatatcggggtattcggcctgctgttcttggtccatcgattgcaagactttttgcccgctgtcgaagttggaagacaagaggatctgggtggacacaaccatggcgaccatgaaggaccaagagattctcggacacagaagacatatccgcatcgggggaaactcgatgtaatcccagagggttccgggacatttgagttgcgactcagccagaccacgttctcggagccttgagtgtacgacatgatcgccgacggagatcaagcgacatgcgcgatggtatagaagtggaaaccgctgcgacctagcattgttattgttatgtgttattattgttattattattagcgattagttattccgagttcagttcattcttttttattataatagcattgctaaatagaagaacaggcctgatttaactagtgaatgccaaatatagaatacagtaacttttatatacaacaaacatactaaaactgaccggacaattttttatttttgttgtaccttttgtagtggcaaatggcgccaaatcacaaatcatatcggaatcctaacaaagcccccccttttaccacttgggacaactccgaacctctccaacttcctttcccttttctctctgccggcttttcacgtttgatatacaatccacgcctgaaaccttgtcgtacaagaacagatgacccctttggcccccccctctttgataccataaccttccccatctcctccgatccctcccaagcattttccgtgttttcccatgttacattttactttgcttcttcatacttcctatactccctcatactacctggatacttcatcggcccgccggaactctccctcatttgcacttctaatacttccccacaggtaacccaagtcgcctcctattctcccttactttctcacggatttctttcccgagccgagtttatgggatttcctttgtcctccctcaagcagattcccgtctctatgaggtttgaaggacggccggatcacaaccctcccagcacattcaagacctatatcattttttatgggatcttggtcgctgtgagatatctcgctttccaaggctactacatggcccgacatggcttttattatacccaggctgcctcttgattcatttgaggatatatgtatccttcttttttcatatcagtttcctactcacccatctagatgctaaccttcacgattgccccgttgattcccactgggatgcctagggcacccaatgacattcccgtgacttgccccactgcggtgaatgccgctagtccctattctgactagcgtgttccatggcttcctgagaacagtcggttttgcagattaccaaattacgataccggtaaccttggaatttttccaaattgccaggaaacctgcccggggggtgtctttcttttcacaatgaaatccaagagaaagagacagagcaagagagagaggcccctccgatggttgttttcgggtcgagtccttcccctcctcccccacccccctcgaagtcctctggtttctcccaagtccagacatcgccccctttcacccttacgcacatggtctctctaccagcccggaccgcccattctctgccttaggcccccgtagcctcctccttcctctgtctccagttcctcaaactcgctctctttttcctctcctttcccctaccctctttttttcgcgcttttcttcccttcttccttgttttctctcatttaatctttgcgccaacctcttctaatctctttccgatcatcgattctacgacttcctcacccccctttcgcttccttcttgtgaccgcaccgtcttcaactttccaacgcgttcactgtcctagcgagacgagattggaaagcgacacgaccacgagaaaaactgatatgcgactggaatagtgacagcctggctacgcctctgtcgagaaaacatcattttgtcttcgcctgagagggggttatctgtcggcgatgacagatacctcctccctcgccatcacgcacgccaccacggattcctatccggtccacgcccatcgcgggtcccctgctgctgtcgacggcgccgcctctgactccggcgcacccgatgaagaaccttacaccatcaaatgcatttgctcgttcgatgaagatgatggcaacacggtgttctgcgaagggtgtgagacatggcagcacattctctgctactacccggataagaaggtaccagatgtgcacaactgtgtcgactgcgagccacggccccttgacaaccgtcgtgcccacgaacgacaacggcagcggcggattcgagagaaaagcgaggacggcgaccggaaagcaagacgatctgggcccagaacacaaaagagaaagtccaatgatgctgatgtgaatgcctttggtcataaacgacatgactcgggttcccgtgagcagccaccgtcgaagagaacaaaggtgtctcgcgggccatcaacttcactgagcggtatttcggttcccccgggtctgtcggccgaagcgcgaaaccgacgatcgtctacctcggttgcggtgagcccaacaggcatccctggccctcctattccccattattcggaagaatttctctctctttacgaccgcgatgatcaatttgttgaatcgaagagtattctcaattacggcgtggattttgtgaatgaaattgtggcgtggctgaaggacccacagatcttggcccgagttaccgatggactcagtgttgaagacttcgccaaacggtccgaagaggccatggatcggtctcgttggccctcattggtaacggaaactgtcacggactcgacaattgagatcggtggtaagcaccccgtccacaagatcttgaaaacaaaggatccagttcagaaggacgatgtcgtcggtgaaatcttcggcaaactaggccacgtcaaagattataaaaagctccacagcaaccgatggaatgaattggggcacgccctgcctttcgtgttcttcaaccgacagctggacttgtacatcgacagtcgtcaggagggaaacgagctccgccacgttcggcggtcgtgcgaggccaatgttaacttgaaaatctacatcaccaatggccgccagtaccatttttgcttcgttgcgaaaagagacatacctgccaatacggaaattactaccatgtggtatttcgacgattctttctttccttccgatgcgacagtgaaggaggagttcaaagacagggtggtagacccgacggacgccgctatttgcattagcaccacattggcgaatttcggtggttgtgcttgtggaaacccccagacttgcgtattgaacaagcttgatcgtcgcgccaagccccctcccaacaaacgctccaaatcgaagctcaagggcaagaccaggaagccaaagtccctcggcctccccgctgatatcggtcgcgccggcagcgaaaccaccaagcatgttgatgagcacgaccctccggccgacgcccgatcaacttctggctccgcgcgtggtagacatactggcagcagtcgcgatctcagtcccacggcgtcacagctaactctgccagagctctccagtcgcgaaagacgtaagatagcggatgccgaaaaacaatttcaacagctagagcaggttaggaacgtcaatgccaaaaggaaaaggcgctctaatcgccctccgacacggtttacccccgcgacacagtcgagctcaactcaaactggcgaggacttcaaaccttaccacgagtttggccctgatcgaaagacccgtcaagttacctatgttgacgctcaaactgaactctacgccgatgatgttgaacgctcgttcttgcgcgcagaacgtctgaggcgaggatacaaactcgacatgatccatcctacacttatgcataagattcggtggtgcgcggggcatcacatcgcagaggacttggcccagcgaaatgcatgggaggccggggacttgagtgtcgtgccatctggggtcatcccctggtggtacggttggttcccgctcccaatcgacgacaggtctcatatcgaattgctcaaggaagattccgaccgaatgggaatacctgctgatcacggtccccttgcgatgccccctcggtggtctttccaccagtccaagtatctccagcctgaatacaactaccatggcattgcgatcagaggaatacattatgaccctccagcgcgaccagtccaaggtgatgttgatactcggggcgctctctcatacaaacgaggatccttcgcatctggctctagcagtgatttgctcaagctctccatttcaccttactggccatccactgcagcgcataccttaaggattccgggggctggcaatcgtggctatctgcgtgtttccatgccaccaccatcgaacattccgtcagtccttagtcctggttccatgtccacggggagtctcgcatcacttagttctcgtgacacggcctccccaatctctcttgtgccatcctctggttctacactcgcaggtacgcctgccaagaagaaactcagtcttggtgattatctgatccgacgtggcacaatgacaaccaccccgacttcggagccagctcctgccccaccttctggtccgcctcccgacgattcacgtctacgtactcaacactttctggctatcacttcggtttttggtgataatcatcaacctcctaagaccgaccccggagaccagaaccagtctccggatatcattatgacggacgcaccggaggcaacacccaccaaaaatccatctatctcttcgtaatacgaccatccacgtggtagtaatggtgggcctgtgataaagggaaaattccgccgtggatttaacgttatcttacgacccaaaatttcttttctcgtgtgatttcatttcgataccttacagcgaggcgggcacggcgttcggacttcaacttttttttggctatctgtgccggcttcttttttcttttttttctctccgacttttcggactctggatggcgtatggcgtggtttgggattggttgggaaataccatttgggtcagcgtctttgggaagtgtgtctgcctgagttgcagcacttgatctttcacgatttgtccagtcttggatatgtatggcctcttttcgagatgctagatagcttgtatgaacaatgtaactttttctgtctaacgtttccgacttcgcatgttttattctagtattcctctctgtgtggcttttcctattcaaattaagtggagcttcttgtttgactacgacggtgatgggtaagatgactcaatcatcatgaggggaacggggaaattcttcacccggcccctcgtttcttctcttattatctgtgatttctgcaactcatatccaatgcttatgccattgatcctaaagcagaatgaacaattccaacgatgaaggcctcgtgctggacgagatgcatcccagaccagcagaagtccccgagatcgagcagcccgctctccctccagcagacggagggaaagccgcatggctgatgctagcttcatgctgcttcatccagctaccagtctggggtctgtcgtgaccgaagcaagactctatctgcatgtaaacactaacgcaacatctagggttctccaccgttttcggcgtcttccaagaataccacttaacacacgacgtcctaaaggggagcaagagtgacctagcgactgttggaactacttcgaccgtacgcaactgatacatatgtcaacgaggccggctgtgctctagtctaatgctttatgttatccctagggactgctctatcttctctcgcctatcacttttacgcttttaacgagatacccgcgtctgcagtattattgtgcacccacgggcttggtcatcaccgtgctgggatctctgttgtcctcgttcgcggtgcgcgtgtggcagttgatcgctacacagggtgtcctgtgtgccatcggcaatgggctcttgttcagtccgtcttccttgtaccttgatcaatggttcttgcgcaggaaaggccttgcgcttgggactatgtgggcggcgaagagtattacaggtgttgttttgcctttcgttgctagtgcttgtctaaataggtttggctcgagtactacgctaaaggcttggactgtcgtcacggtatgagcttcctctttcctcggtttgatgttaagcatagggtgtgtcttgggtttgataccgaaccatggctgacaaaatctatcagttgttaaccaccctcgttgccttgccattcatgaaaccccgtattccaatatcgccatctgcttcagcccgtcgcttggatctgagcttcctcacacaaaccactttctggatgctgcaaacgggcaatatcatccagagttttggatatttcttgccgacgacattcctcccttcttattcgacaaggacggtcgggctatcccagaacaccggtacaatgctggtctcgttgttcaacgcaacgtctatcgttggcgggatagccctgggagcactctgtgaccgcttctccgtcacaaacatcatgctgctgtcctcggttggctcagcgttgtcagttgttctcttctggggtctggcatcgtcggctggctcggactcgtcgcagacagctattgcccttctaactgtcttttccatcacgtatggcttctttgccggtgggttcagctccacctggtctggggttattactcagatcaagcgtgactcggcgccatccctggataccgggcttgtctttggtcttcttgctggtggacggggtattggaaatgttatcagtggaccgttgagtacggtgctgattcaatctgggtctttgggagagagtggtctgaagggcaatactgggtttgaatcccagtatggaacgcttatccttttcactggcatcacggcctttttcggtgcatggagctggatgtggcggtatatcagccctgcactgcggtgtctctgttgatcgttcggaacagtctcggagtaggagcagagaataggagttggtggttcatagtaaattaagggaggacaaatgtaaagcgtcatgagtagattcaaatagcagctatctatggaaatgttttattcaatcaaactattcttttctggagaatgtcaattcttttctggagaatgtcaaggtgactcgagatgataataccgtgtcacgtgcagtccgcggagcttcgactccaaatgcgcgttcctcaatctcagccccgacaactttcttacatatacctgctgcaaccaagggccactgccctattctacaacaatggcaaccgaggccgcactccaagatcctctcctggcactgcgacgtgcgattgcctctggcaacctcccaacgccgacgacctcgtccgagctgtccgaccagcctgccacagacgacctggccaaagccacacacctctacttcgcccaaccagcccctcaaacaatcgctttgtcaacactcacacgattcatctcagcatctaccaaagcccccgttgacctgcgcagtattcttttcgcctggcagaacaaagatgtcgctatccccgagtacatcgccaaggcgcaggaattcaacgaagcgctgaagaagcagacgccagagggtggcaaggaggaaagtgttcagatccttatcttccttgagcgccttgaccttttcacctggctcgagggtgcctccgacgacagcgaacatatcaaacccctcgagggtgctgctgccgctgctgaggcagccgccgcggctgcaggtgtcgcgcaggccgataatgccgcgggaattgccgccggtgcaattggcggcgtcacgtccgtccccagtggaaccgcaggagcagcccaggctggaactcaacccggccgcccacaaaagcagattgaccctcgactacaggagatttacaatggggagcgcaagaccggcgaccgcaacacagtgctacgcggaatcaagccgacagtgagttactctctgacaggatacgatagacggtagcaagctaacgcctcatttcccaggacttctcacacgtccgcaagagcgccgaggtgttcctcgaccgcaaccgtaatcggcccggccagccaggtgtcaaaccaggcagcaagggctccatcccagctccatcagccggcctctcgatgccatcctcgcgcaagtcgagctcctcccactcccgccctgaccccatcatcctaatctcaccctccgcctcctccctcatccgcatgtcgaacgtcaaatccttcctcgaagaaggtatcttcgtacctccggaccacccaaccctcaccggcaccacagacgccaacctcgtaaagctagagcgaccactccgtctcaacggcgacgcttcgaaccccgcgagcgcaagctcccgcgccggcaaacccacccgcccaaccaagtttatcgtcgtcgacggcacgaccaacttcaaaccggagtactggaaccgactcgtcgccgtcttcacgaccggccagacctggcagttcaagtcgtacaagtggtcttcgccaccggagctgttcaagcacgctaccggtgtgtatatcggatggcgcggggaggatatccctagccaggttaagggctggggtcgtggagttgacacctttgctgttgagcgctgggacgagaagaacggtgtccacggtggtgggcgttggcgggatcgggaggttgttgagggtatttggactgccattgaggagggcatgagacttcgtggatggggaactaagtagacttttttttccttttttttggtctcggttcctctttctcggttttcctgtcatcttgtttatctcaataccctcaattctctaagaatatgatgaccatcggcattcaaggcgcagttttaggcgttgtggttgtcttttttttcttcttgttcctatcatgtttatgtatttatagctgatctgggctttcaatctgtaatttcgattcatatctggtataattcgtgacaagcacttcttcctcgggccaatatagccctatctaactcctagaacacaacatctgcctacattcctgcatactccattaactattgaattgcaatatatgataatataagaccgtattcattgcaattcccaattgaaggataatatgacatacacaagcagaccagaactcactcgctgtgcccggatagaacgatgcagggaaacttaagggacaaacgacggataggaaaaattgaaatcgagataaaagaaaaaaaaggacaaaaagatatggaatcatataacatgctcaaatgaaagcaataaatgcaagagataaagatgatgcgatgtatggggggacaagaaggacatgcaataaacaatcaacgccgggtctgatgctcaaaaggaaaaaagaaatataagaagaaacagcctccgatctttcaggttctcaatgttttgtttttttgtggttttctggttctgtgtttgtttcttttggggagagagagagatggatatggatatgggggaagagtgcgaagggaagaaagagtaagggaataaaggaaaaggaaaataaacaaaacaatgccatccaaatattacaaatattttccagttccggcctttctctataacatgagccatcgatcataacgtctttcgttcagctgagaatctcgtgacgagtggattaaaaaaaggaaaatggagatggcagccagccctcatcgagagagactgtggctggactgcatgcggaggagagagtaaataacttcgtgatcgggaacgatcgtgggcgagattgatcaaattgggtctcagggtcgaccggatattgtgtccccgttttgtatatggtgcgggggtttcggtgttggggccacaagcatgagagtgcagggttgcagtgcggttgaattcgatctctgccttggggaaggcgttcgaatgcggattgctggactgcatgtgtcgaaatgattcaggctgctgcaatgcaccgaagggctcatgaggagtcggaatcgcagtggtacgaatcgtcttcgaatgggttgcgggctatgtcaatgcttgtgggcggtgattgtcaggcacgggcagagcggctcatgctgcgttctgggatggcgggtggagcgggaggagcgggtggtgtgggcgagtatgaacgcgagcctccgatgatgtcgacatcgtgttcttgtagaacgacggagtacttgggatcgcgcaggaatttggggacagaatcgcttgacatcagcttaaacacggaagtttgagcaagctcgaacaggtgcaccacttcttggagactcttgaacatggactcgtcgtctcccacggccttggtcatgcggctggcgaggctgttgcggagagcatggtcgatgtttagttcacagggtgagccgggagccaaaaacgcgttgtacaatccgtatgctgcagccaaagtttcccgcactgaatcgaccttgttgaatgtacccatcttctccgccttgtggtaattggtggtgaattccgacacatcgaggtaaaaagatagattctcttcacacagcgagtagcgaaggaactcacggaaaagcaaacgcagagcgggatcctggaggatatgggtcaatcgggcgttattggaatcgcgtggcatcccacgactgtcgtacgttggcgcaacctcgcgggtcttctcgcgggcaatccatccacatacgcgctgcccccgttcggtaatgccgtagatggcatacttggaaggctggaaatgagcattggtcccaacatccgggaattgcttgtcgtcttgaatcatcgtgatcaagccatacttcaggaacagctcggagatcaaacaggtcccccggcgctcgatagtagtcgaacaatccatcaaccagtccaccgatgcctttccggtaaatgtgttgctataaacctttccatccaggagtttgcgctcccgagccaccttcactccaaccaggccgttggtgtaatcactaagcgagtccgaatccgaggttgaaatactgcttttgatgttcgggccatcctgaccagcaaagcggcggaagatcacctcgatcgtcgcgcgatcatgggacagcttgtcggtatccgtgtcccgctcgagattcaccagctgcatggtattgcgtggcgactccagtacatccatcacgtgacgagcggtaatgccgttacgctggcagaaacgctgcaggatattgataccctttggggtaagctggaagagggcgcccttgagcgggaagatcaaaagctccctgccgtcgacggattcaatgaagcgcgcatcgacaaatcgctggcagacggatcgggccatttccttggccatagagaatgtagtggtggtagtagtcgtaactatgcgggatgggtccttgggatcgggcatgcggttggactgggagaatttgagcgagcccaagttgttgatggcctcttccgaggtgaatgtgtggtcatatctagtgaaacgaacgcggtgcgaatccaacttcaagctgaccatcaatgtggagaacaagtccatgaaatcctgcgctgatcagcccaattgttctaattttgcaatcgcattccaatgcgagcctacctttgtgaatgggcgctcatcctcggtcatgcgcaacaaccttgacgacgtctgatgcattttgggtgcgggcggggaaggacgggtttcgtggggaggtgtaggaagacgctgaagagtcaagcgacgcttgagcaccgaattggcaggattgtcgaccaaggccggggacgaagggcgcgaggttcccgtcaattgctcgtaagtgtcgctgtcgaatggtggggtcacaggggttgcggagagcttatgcggtctcgacaggctaccgtatgaagtggaggagcgtactgtacttccagacagactagcaagagcgttggaggtcttttgagctaaggcagcaaaagaacgacgattgcgtgagatgataccgccaaaatcagaatcaggaactgaagggagagaatattctcggctgtggctcccggtttgggttggcattgaatggttttgagtcttcgggttgaaccagagggaggaaaaaagtggattatgccaaacacctgataccggaaaaaaacatgggaatttggtaaaataaaaaataaaaagaaaataaaaaagaattaagtggactaagtcctccaaggcaaaaatgtaaaaagggtaagaagggggacagcaaggaaattatacactatgacaatttcccattagtattattttctctttttttttcgaatcgatttcaatagaaaagaaaaggaggagtagagggaagatggggctaaaggggggggagaaagagaacgggattgaagagaaaataagaaaaatgatttttgcccgaataattgaaaatggaaatgaaaaagaaaaagaattaaaaaaaagaaatcaaaaagacaagaaaaagaaaagaagcgccattcggcctgtcagcctacaacatatgatccacagcccacgcgtgagccccgaaagagtttggcctgatgcatccaaacaacgtgggccatgaagatcggtgggttctggggtctggtattatatttgtaccataccatacctgcatattggctccctgggtctgcaacggatgttagctaataaatagctccctggtaattgcatgcaaggggggttatcaagtacaccagagccaaatgactgggagatgtgaataccctctctatagtccatagtcgatactcatggtttgggcgattccaaatcaacctatggaaccagagacagaaattaattaaaatggatccgcaatctgtttccaatgatttcattgattttttgcccgagttccaaggtcgaccgaacaaatccgtaatacgtgatactggtaatacctgtaccctgaacattgaacatggaaacattcctggcatacctcacccgttccattctgctactaccttactgccttaggactagtcgtctgcttttgagcatctggagcttcggagtattaacgggtgaatccagatctaaatcttcagtgttaccatattagtttgctgtctttcaatagcctcctccggcttcgatgggatagatctgactatgtcatttcacattcgatgtgtaagctaatcccgacaaaacaggtaatgatgtgaaagcttgaatccacgtggaaatccctacacttcccgaaatctaaggttatattgctaattatgatacatatctatgttgaataatcatcaataatagctaccatgggagtcattctaaccttatcaagtagcccttggcaacctagatatgacaacgggacattctttgcttgttcctcatccaagccacaccaaacctggaaatagatcagaaacattgttctatattggacacatggttccgggctgttgccggagagtgggcgttattgtacctatttatgttgtctccagagaatcagaaacatcctcgtacatatattgttgtatcacatgtcgccatcgggtcaaagacccccacctcactccgatcgtccaatggtggggcaattaggaacttggcacgctttcacacttcttccctgtttcgtaccgagcattgcggtgtttcgtcttgtcgctaatcctaatttggaatgtcagggaggtctcaatccgaaactatactaattgtacagcgcaagaagacaacatgatgattagttactaatcaatatataatcctcattgtcatacacaaggttgaatgttcatagtggggggaggggtatattatttcccctttgaggaccttgcgtaactagaaacatcccaaggcggtcaaaatagattaataataatcctaatctccaggcttccatggcaattccaagcgtcttcttttcgtttggtgtgcataacccatgtggtcccacgtgggcacacgtggagagagatgcttagcgtctgaccgccgaatccgctctcaactgttttgcgcatagaaaggaggcgcagcctcgcgaatctttgccgaatgtctcagttacgggtcgcgatgggcagctagcgctaacaagttccaggattttaagcgtgaaattaccctatcattcaacggttttggttcgcgtctccggttcctggaaaaagcgggtttcaggtttcctccccgtccagttttcgcgaaaacacggggttttaccgccttgacgaaacaattgacgccatccaataataccagagacgcccctagtgtcgcatacccgcggatcatgatcgtcaatcatcgcgttatcatttcctcatggcttgcaatacgtgaccaatacgcagtgaggcaggggtcgccaatctccgtggtcggggaccaacgtcagcgagataacgctaagggttaacacgagagcctcatcttacacttccccggtaagacagcccccaacacgcacaaagacggccctaaggatttcacttgcatgaaccgcgcttttaattggaagtttcagaaaagccattcaacgcccccggtcaagctatcagacacgtcagcaagacccgtgctgaccaagaaacggtgccggccaaccaaacctcctggaacatgtcacgcgaaacaacaatgcaagacgttagtgcgagtttcacccgccagatgccgactttcccttgactgaccaacaatttcctactccgtccctacgatacgaattaccagtttagtattccctatggagtagtcctaaaaaaaagaaggtttggactccgctcaggcgcggccatagagacagattgagcaaagatactccgtgatatgatagcatatgatatgagattggctcccccgcaagacgagattagccaacgaaagttaaattggatagcgcagatcgaagaactcattctactttgtacaacacaggacagaaaccttggaaggagataagaacattcgaataagcgacacgtcatatcgacatactttgcactatgtattgagatctatcgcgcaggatcgatcacaagaacgcgatcgaacggtgccacgtgtattgaaggggaataaaactgtttctcttctaacacgggcagctcgccggaaagggagtttccggtcgcgacatctcggctcagccctgtacgagcaatgccgatttggctcatatcactcccgtgtggctctagtgagaatgatgggtttgctagttgactagtcagttggttggtttcaaggagtctgacagaaccaagtgagcaattcaaggagtgggttagccaataattcgatatcatcgtacggggtaactactccggaattcgtatacgtatatactatgtagattactttcaatacgattagtgctcgcacatcagatccattattgcgagacgctaaactcgaagagaattggtggaaactatccctgtcgctttgttccgccaggcatgtcgaagtggattgaagctatccaaaattcagccccgcttacagattggctcgcggaggttttgctgttcagagtctaaagttgcggtcagacattcaacggtaagtagaaagatatcacttgagccgaaggagactccagggaccctcttgacgtgatgaggtatgtatcgttgtatctgacattacctctatgtaatttaagccacatggtattgtctttgtccagggtgtcaacatccctggcggccacgcgacaagggactcctgcaggcttgcattgttcaggggtaaaagacaccatctgcatatatgtaaattataacgtggattgtacaagatacacgttttgacacgagtcatgaaaactcaaaatcaccctgaatcatttcagctgccaagatgtcaatcctattctttcgggacaagtctgcatcctttgtttcagggccagggctgtccctagatgtcgatccgccaaatgaaaagcttatgtacattagctagctctatgacataccttgcctaaagatagaagggaatctcatattggactcccgtactcgacacaggcagcttactttcctagccacatatcacctccttgcctattcgagggtccctgcatgtagcaggtgtgcttcgtacatactccgaactgcatggttgtatgcagatctccacggaattcagggactcgacatccgagagttaattcctgttctgtaggaatgtggcttgcgcgattgggattcgaactatgcgctgatgctccctgggctgaccatgctaaaccctaaacatctgaaccctggctccggggtgattgctgagtaaaggatttagattttgaccaggcccggggtagagaagggcctagatgaatctcgaccttcgccttcactgccccttgatgcacatcccatactgagttcatttagatgttctagatcgcaatatcatatcaaccttcaatataaggtcgatcttcgctcccgaagacccatcagcagtccagatttaaataggccaagaaatcccgaggctacgtatcacattgcagaggccgaagctgccgagagctacgaatgtgggggaagcatgactgatgttacagtgccacgtgaaatgccggagaggtcgacaatttagacctcgagcacagatctatctgatcatcctctagttacagtagggcgaaacttgtaagcaaggtgtcgacctatccttcgcaagtatgaccccgtaatgggaccatgtggcttgcgcagcgacctacccatgtctagtgaaaaccctgacaaagtatgttgtaatgacagaaactctccttgcgactagcgaaaacactagtagaaaacaatcgcgtgcacgcagcacttcgtgaacagagcctcatgtctcatcggatctgttgcctattcggtaccatgctgggggagattgcacatatctatctctctggtacggagtagcggtgctgatctttaattttttgaaccctcaacaaacttaagagctttcaccgtgtaattttgcctcacctcagttcttctcggacatcccgattttttgcaaaatagtctgagtgggtcttttcgcatatgtatatgcaaagaccaaggttctgatctgcggccagatacggagataagagaaggatcttcgatgtagcgaagttgaactctgtttttcacaaatgggagcaattcgagtgcacacatcatactcccgaggtccttataggccgtttgtagtaatatcccttttgcccgtgtgtattataccggtgtatcataccgccacctgtatatagaatacgaggaattcgactttacccgttcgtgatgggctccacctgctgaaaacaggtagtgtagggtggagtgtagcagtgaaccacgtcatagactttgaatagttaaattattgaaccaagactttaaaaaggtggccctgaatcatgtacggcatccacagtcccggatttacgttaacggcgaagtccggcgtggcaaatctgtggaaacgctagaagtcttctagaatccttctagaagacgccaagaagccgcgtttcgggcgatccatggttcagcgggccaatatattaactgtttcgtctgtttatcccctttctgttgataaaggggctgtattttgggaaaagtctattctggttccgatgcgttgtttcaatgttgtttttctcctgttcctgaattccgactgatctcggaatacaactgaagataagggcttggtgtcaattgtaaaatgtcgaactatattcgcgctaggcattacttaaaatgtctgccaaaccaatgagacatctaataatatacgatacagaacaaattcatacccaagagtctcatgttggatctacgttacttgtagatctacaatgtacgtaagaataaggccgaaagcgagaaaacaacaaacctcttacggtatggagtactttgtatacccactggtccaccttcacggtagacacggcagaagagccacacgggaacaaaaggaccttgaagtccacgtggcagatcggcaaaacaccggtgacagagagaataatagccgacctacatatcaactatagccctaacctggttagcctgtgaggtactagggagtagctaaattatggcataaacacgtgtattccgttctttccatcttgattttcttcatgctctcatttactatgttctagtagtatattcaaacaattgggactaaaatcaagttctttcttgaagacgttcatccaatactcatttttcatacattactccgctcataccaatgatattagtttacaaaattatgttgggcatcccaacagccgcacgagccccaagaccaaaacaaaattacccaaaaggcatgtatcgttccaaaaacgcagcttcaccgcaagaccaaagcaaatctaaggcctggtgaaagtttgcgggacctctctcacacccttccaacacctgccctatcttattggattgggcagccaaaagcgcctgctcaggaacagcatgaaattgtgctgctaactgagtagcgaattggtcggtgcgctgcctttttcgcagccataagcagtgggtagatgtgacggcctccaggattccttatataagcgtccgctcgctccgcagcattgagggcttcgtacatgccaccacccgtaggctcccgtagcttgttacacatactccgtacttggtgggcattggttatctttagtttccgaaatatccgtcattatctgtctctgtgtaatgcttgaggaagtgaggaatcttacgagggtcttgctggcacatcaaaagcgcatgcttgggtctgccgctgttcggattgcttgttccacagacactcgaatagaaatcgcttcttctcctctattacagttcactatatatcgctactatatgcttatgtgtttgcttgctcgcttcctgtttgcattgtttactagtttactttcatatattgcttgttagatagccaagcaagaaggttggttgcaacgtttgtagaagcgccaccctataagaatagaatttgtaggtgagatcctgtatcctattcgggcgaaaagaagccgaagacaatatcaaaattctaatgaggatatacctatagagtcactaggccttccgcatatcaaaccccgatggtcctatacgcgagtgacgagattggtttctgcactcggagagtcaaaaaaagtacctggcattgagtcaggttggagtaaatcatagaacgcattcatgaatgatgtgaatcatctattggtcggtagggacggactgtcgctatccttgagtggagtctcaactgtcgaacaagagtcgtgagtggttttttggaattatatatacagaatcgagatgccggtgaagccaaagagggacgggaaattagttcttcattcagtcattatgattttgcctcacgagatgtccatatccaagctaatacgatatttactttactaggtttagtgatctcatatcgatcttgcattgaaatcctagctgagagaaaaagcaaatctgtataatgaaagatcggcctgagatgagaatctatgctaacctatagtagcaggctaagaagatcagggctattggctgtcaggtagctctatgtgaattgatataaaattgaggtgtctaatagacaaaggcttagatgataattgctaatctgttatgcttttcaataagctacattctaaagtctctgtagacctctcctaacatgccatgccataaaagcacctatcaaattcctccttgcgttcaattcaatctccaagtgcctttgttgagaccatttctgcctcaggttgatgagacctactttctaccttgtttgatcttccttctttctcttagccagctgatacaacataacccaaggtttcctttatcaacaagcaagatcatttcaacaagcatcctatttcaaagtaagttctcctctattcgaatcagggtcagtgtctagttaactgatcacctattctttaaagtcactatcatgaccttcgccaaccagaaaaggaaaactacagcctagagcgacaagtgaagagttctacagctcgtcagacatatattattggaacgagcttacgtgcaaacgtccaacctctcatccaacaaccccgagcaaccagttcatacctcgccgcaggtatcgatgaaacagtgcatgttctaggtctgtcgctaagccagtatcgccaaccctaaaaactccatataggacccgaaatcattgcgtcctcttctactgcctccgaggctcagtatcatatgctgcgatcctacatgactcagatggcccaacacattctctgcagtctttgatcaatatgtcgaattaagtggttcaaatcagccagtactgcaaaccagtgctgttttaatatggcgggtgttgcagcctaccagggcgattaaaatgatacttgatagtggattggcttcacccactgctttttcatgcgaggaagcagtccaaggagggagcgctttggaagaccttacagtttcgtcacgaacaactggcttgttcaggtcgtcaggcttttgggatgatttgttcaattttactttacttattttaccgctaattcttatcgtagcttgcaccaataaggggcaaagtactcatgaaccaaaagacatgacaaggtcgtatgaaagaatcattttatcgcgtggatccctagtggattctgagctatattagtatgaaggtttcagggatcgtcatgcagttatcgcaaatgcgataaatgagtgggactgtcgttgccgaatacaccaaactctctaaatgacttgcatcgttatcttgtggagctttcacccatgtgggtgctgaagaatgtagatcagtcggcattgtttgatttgtcattcctcagtcactcgcattcgcattatggtatgaccagagacttgctctgccacgtccagcgtagaattcggtgataacagccttgacttgcgatacggtagttttgcgaaccatcttgaggcagataaccatgtctagggtgtatctcgcaaggaaaaccgagaagttgtatacgttgtaagataccgctttgaggaacaataatccgtacgccatacataatactctaatttgagcttaatgctattatcggtacgtggcaagccgctcaattactattgacggaaatatttccatcaacgacatcagcccatttgaaatacgtcggtgatgcttgaccgtcgttttccgctactgcagggaagacggaagttggccgatgatcctaaggaaaccaaatccaatcaaatcacactccgtgcacgctcttcagttgcaaagtgccgagatcgtcgttgatatctccctaattaaccccaagcctaatagtctaactgtccgacttgagataaacctccgatcatccacttgttttgactttccttatccctgcaagcgcaaaactagccgtcttagcgggtcaagccacgaagcctgaagaaatgcgaaaaggacgattctaactagaaggagacgttctacttttgtctcttctgacaaagcggggcagtcagcgcgaagccggtgaggaggagatgcttgacgactcgctgttctcgtacggcattgcagtggattatgcattttgctatccttgtctagcatctttgcataattacctatacgttgcacaaaagctccttttatcaacatgtcgtgccaggtctaatttaccttctgaaaccgagtctcctatttccgtcgcaaccgcagtccggcccctatctcaactgctgcaacatacatacccggaaagggtattttgggctatcgcatggtccaatgccattcgggatttgctttgcacagccagactgcgccagacacatggtcagccatgcttggtcatgctcagcaatgcccagacggaagcgagcatatcgatctgcaacctgcagcatgacctgattattaacaactagttgagctctgggcttaaagagctagattactccgtatacatcgaagtgcatcagagccatgcgagtattgcaggattgtggagtcttcgacttccctcgctgtatttggctccactactcttcgtttcacctccagttatcacgacgtcacacacatccaataaatagtaacctaagtatcaaaaataaagcctctccgccatatgaattgaatggcccttggcatcctgcagatatcgcatggtatcccagtggtcggcgtcctatatgcagagtaatatatgttcaacgcacaacttaccatactaacacagcagcccctccttttaccatttgtggatagagatatgagagtcagccatgtcactttgaacacatggcaagccacatgcatatgtccgaaggccgcgtgtttgggggttcaattaaatagagtacagaatgtcaacttagaagaacagcatttacggggtacatattcccacaataaatacctttttaccttttaaaagactgtattttgagcaaggagatcaccacaaggcagtaagattcgaaaagctgccagcattcccattggcacagttgcctattagaagtacatactactggaatcaaagaagatgcaagatttgtctctatggagaatcaatcagccagttttgagattatctatgttgtacatggcattcatatctaaatcccgatatcgctaccactcttttatatatgtcataggcctacgcagatcatcagatcatcaaaggctaatcaaatgacatccactgcaccgtctatcatctacaactagcttttgagttatagcaatattacgtacagaccccctcagagctcacgggtacatgtaatccgtatcccaacaacgcgggagtgtgcatttcccatcaaagacaaggatgacgtgactgaccattctcagcaactaggatagacgatggaaaatgatgatcgccagatttaaatggtggtcaggtaggtttggggctagtgaagttttccaataacttgaatcatggagctggggggtgcttgcttggtgtttgttgtacatgtggttatgtacggagtacatggtgttttgatatatccgataccggccgtcggcttgagttcggggcatatgttggggctggtatagatcccctaggcttggttaggatgtgtatatttccttgtatagaattccgtaggctgcttgtgtgtgcgatgtgttttgtttatctttggttgtgttgtgttgcgatatcaattccagaatggagaattgggaaattaattaagatgttttccgactagcaactcatatcatgatagacggatagtcaaggccaaatgccatgcttgtcaccggcacaaataacccaacacagtaaatgcttgcaagatccacttgctgagaggtctatccgcgccaccactggcccaatgcacccccagagctagccatttcaatgacctcctcgaaactaatttccacacggaacatctgcccgtcagcagtgccgttcccactacccacgggtgtcacgagtccccagctgagcagtctttcccaagactctcgggccacatctcggccccagacacggcctggtgtggcagaagctcccgacaccgaggcagatacctttgcggatgtcaggagccgaacgtattctgcgtatgcggcggggaatgaaagcgcaagtggtcccatgctctgtgactgggacccgtcgtttccggggtcgaacagggctgccaagcgtgttgcggctaccaacaaagccagtggcaatgacgagggactggatgatgtgatggatgtggagaatgggagaggtgctgggtctgggcactcaagggattgggaagagaagcttttcggggttgggacttcgggtataggtgcgtcggcggtcgacacactttgtagcaagtcgccgatggggagaagcgcgctgttgaaaaactcctttgctgatttggtttggttgtagatacgcttgaggtggaattgaaattcgttgtcattccacaaatgctattttcaagacagcgatttagcaaagatgcaattaattggataaaggaaaatacagatcttaccttcaaatattccttccatcccccaagcagtgtattccacttgttcgactctactagaatgcgttcagacccaagttcatctgcaatatcaaccatttcggcgtcactgagatccaggctccctaggcagatatctgaaaaggcctcgaaggatcgaggtagaggaacgtaagtataacgatgactaaatcgactcttgacacgcttctcgagcatttcggttacgtcgacctttgtcgtgagcccaatcaccgtgatgggggctttgcgggcttgggcaatatcgaacagattatacaacaaagtctgtcgtgggtgagtgacgaataggtcgaactcatccaacaagatcacaatggatttcgcagcagtcttcgatcctgggtccccagaagtcccgaagagttcctctggatgtgacaataaagccaagagcgtggccatcgtatccgcataagaactgaccttagccgcatcttcctcggtatgcgtctcacggccaagttggcgccacatttctcgcaaagctagacggtcgtctgtgtgcaagaacccattgagacgaacgacgtgaaactcattgcaatgctcctttctaagagacgaaatgatagattccacaatcgccgtcttgccgcatcccctggatccaagaagaagcatggagttgccctctccgatagagacggtctgttcaatgagctgatgaaccttctggtattcagcttcgagtccccgcactggaatctgtcgtttccctgtcagcttttcgagaagaatagtcgagagaatgcgcatttcgtccccaaggcccgtctgacagagcgcctggaattttccagcatattccggcaacggctcggagacatcgatagtctcatgcgcctccggctggtcatgataaaggtcttgctggagttgtattgtatcgatgtcatccaagccgtcctgatacccaggcgaaggtgacttctctttcggctctgcgaccaaggctttcttggatctaggcttcgcggtgcttctcttcgatctggtccttgtaattgtacgaggggcgggttccggggacggctcgtcgaggtccatgtcatcatcgtcatcatcttcctctttaaattcaggttcgtcttcttcttcgtcttctaccggggattgccgcagcttttgcgcgcttcgtgtgggacgcgcacttctcgaaggagtggctgcttgttttctcctcgatgagggtgttacggcttcttggtcgtacctttttggtgttttgcgttgccgcccacttgaccgtgtcccaattcgtgcgggagtttgtgcttcatcttcctcaacctcgccgccttggcccgtcgttacggggtctgggttgtctccgcgggtagtttgacgccgcgatgcacttttcaccggtgtgggagaaattccgtgattgtcgggggatgtcgggacggagaatacgtcttgatcatcatttcccatatcgatgtctccatcaacgtcctcggagacccttctcctcttagatgctcggggcatggttgtggtttgaggaaatggaatagctggtatcgggtactttccaattcgatggagaggggatttcgtgagggtaaaggactcaaaccgggaaaatctggcggtttcctgtcagataagtgtttgcgcctatgtcaattagaatcagattcaatcaatgctgtttatttccgaccagcctgagtagtccaggagctgtcccaccgaatgtaatgacttacaaagagaaaatcaatagcgcatttatcgttaatcaagaccaacaagcgcaacccgtgtgaatcagattccaacagaagaccgggattcaattgctggtcaattgctcaaagggtcggccggacaacaattggccgattttcgcctcaggccgagacgcgtgacgcgaagtcaggtgcttcccgaggtcactttgacaagtcgcaacttggaattgctctttcgttaatattgtcttactgtagggatcagaagtctcaataaccgggattcacagacaaacatgaagaactgaagtcgaactgtaccgactactagggggcgggtatagcaattctcctgaagaacgcgacatcatttgtcaacgctacaaaaacatgactgccaatatcccggagatcatcctgctctgccaggacgcagactttatcaccgcctttcaaacagcgcagcaagagcactggcccgaattaccatcaaagctcacgatcacccttatcaactcgcgcctgaaccgccttgacccctcagtaaccttcgacctaatcgtctcacccgcgaactcatatggccgtctagatggaggctttgacgacgccatctcattagccttcagcccgcgtgatgactacgaagctctaacgcgcgcagtgcagctggagctatacgagaaatggcgaggattcgcgccgccaggcacatgcaggctcgtgcaattccctgggccgcttttgcagaatttccggcgctgttcctgggtggctatatgtccaactatgcgagagccgatgaatgtcgtcttggaccgggaggttgtctatgagagtgtctggagtttgttatgtgaggtcgaggggcgtaatcgggcctctgaagcgaaaattaattgtctcttgatgacgccccaggctgctggtattgggaaggttagtaaggagcgttggtcggcacagatggtgcttgcaatgaaacattttgtggacgcagtcgaaaggccggaacggtggagtcgaatgcagtggaatgagatcatgaaggattgtgacgaagttgcgacgacatggaagacaaaaggagcagtatagataaactcgttcccaattgtccttgtcgtcttaggtctgtatgtaagatcatggctagcctgaatgttacacttatgtttcctacattcatgagatggaatttggccgtgttgatgaggcgctgcgagaaaacgatgacagcccaaagctactaacaaggccacccattagtaaccatggattctatgtgttgcgggaagattaggttctctatagactgggccggggttgagcctgggactctacaagtggatgccaagtatagctttgccgttcgtggaaatcagattcgcgaggaaaaagaagtatctcgattatttgggatatccggatttattatagcacagctggtctttgtggagtactaggaagtgaggttactcatgacggatatgtccaactgctcctgctgtgtcaatgtacgattgagttggaaactgcgtaaaatgcgagcgttggggagattctgtgcctgaaccgaattaatgaattccgtgacactaggatctcctgtagagttgagctttgtccagccaatatgttgaattggagcagaaagcatctaaagctcgtcagcgaagccgcgagaagggatattccatctactgcgtggatgacaggttgaatgtcaggtcaagtctgggagtagttgctatagtatatattgaattcggagagatgaactcttccccaatttaagcatatctgatccgttcgaggtcggcttcaccacagccgaggtccaatatgatgatccgagctacggctgtggggtttagccttaagctacttctactccaacatttcttccccctaaacctttctagtgctctttgcatttgtcattcctttcagataccatgtcacataacgcaataagcgctccgcccaggcaactggacgagttcgaacagctcgtctatgagtatacggcgcgcatgggcctggggaacgaggaagtaagtaccatacgcagcaatattaaaataatgaattgcatcccccgcctatacagcgccagagcgcatagttgaatcccatcgcttacccttattgaagcactgggacatcgatgcccgcggctgtaacctccgcttcgagtccgcaacccgtggtcctccggctacagtttcgttcctcttgacgatcactcctgcgctgaccaattactttggtaacctccatgggggctgcgctgctactttgatcgatgttctatccaccactatcttgttaggcgtttccgagccgggcaggttctccttcggaggtgtcagccgcaacctcaagatcacatatctgcgccctgtgcctgcgggaactgaggtgcggctcgtttgtgaggttattcatgttggcaagcggttggcattgcttcgggctgagattcagagggcggagagtggtgatgtttgtgtgattggtgaacatgagaaggccaataccgacccggaggtgacgcagaggatttgatttgatgtgatgattttgtttctttttttggtacgtctagaagacaacatggatcttcgaatgttaagaggtagccactgggatataaatttatagatctcatttgcaccaataaaggtgccaaattcaagccattgtacgagcgaagatcatagtagtgaccagaatattgtgcttcgtttgctatgatagggaaggacggacaaagaacagagaggccatcgcacatgttcaagagaaatataatcaaccaatctaagcagtactagattatccgattgtaagtcgagtatccctctttactcggtggccagttgctggtcttcgcgcagaccctcaaccttcaactcctcgccagtggcacggcgatacacatcgcggacatcatctgggggaattattagccagctattaatatattttcaatcacagatagcttaccggtcgtagtctcgaagtgtgatgtcgcgtcatagctcttagaaatgaagatgttggactcctcgccattgtcggtgggctcgtagagaggaatggggggtcccatgaacttttcttcgatcttgcccagacgctcgaagccaggctcaagctcaaggtggtggttagcatcgttctcggcgatggtggacacaatagcgacgtagtagcccttggggcagacgttatgagcggacgaaaccatggcaatgtaaatatctgaagaggttagtgccctattgataatgactgtatatatataactcaccatgcttgcgtccaacctgggactggggaatgatcagctgcacagagtcactgctgtcggtcttatcgatggggtggttcaggatgcaaatagccttgagcaagtatccggtgaccttagtcttgtcggggaagtaagaaggatcagcgatgatcttcttagtcttagtctcaaacttcatagcttcggattggtcgtcacggtccttcatggttgccttgattccggaaaccttgccgttctcgtaaagcacttcgtcgacgtcggtattcagcatgtaggtaccgccgtggatggcagacagacgagcgaagccctggggcagctcgccgaggccgtagagagggtagatataaggcgactttccgtagcgtgccatagagttgacatacagacggatacggttaatggtttcaacggcagcgccagtctggttgatatattcgtccgaggggtacaaagccatggagtgaccgacgaaatcacgagtgttatcctccaggccaaacttgtcgtaaacatccttcatcgtgcacgcatgaatgtccaatcctgatctccattagctatccgcttcgacgagccccgaactgacctaggttgcaaatacataccctggtgactggctgggtcgtcttccttgaaatcaccaacccactcgaggaacttcttggcgcgtcgcttttcgaacaagcccatgagcgacgagcggagagcttcaccagcatcggaaggcaccttggccacggtcgccttgggaccctttccttgctgaacgtagctgccagcaatctgcttgaactcgaggtatcgggtaacgtccgtggacaccaaaatgttggtcaactctccattggacatgagtagcttggggaccaagtcgatgttccagtcattgaccctcccgtatttcttccatggctcctcgccgggggcaacgttgccgtatttcttgaacagctgcaaagggtgtcaataaggtaagttgggaataaattggtgcacatactgcttcgatgttgacggaagctgcttctctgtgaacattgtgagctattttgatcttggtgccatcatcgtgagcttcgccgacttaccctccatagtgatcattgcgatcgatgtgaaggaccttgttacccttcacactgaggacactgtagtcgaaaaggatgagcaaatggtggaatcatcaaagcccaagctcaaatacctacccagacaaaacacactcggtcaggcctaaacgaaattggtcagttgttgacgttttgaggggatggcggggtagcaacataccagtgccgagcaccacaacatcgtattctggggcgatctcatccataatgaatatggaagttactagaggtagagaaaaatagagagaagattcaagagaatgaggagaagagaaagttgactatctccccgcggatcggtgagaaaggggaactatttgtcggatccgccactagtgaattacctcatgatattaatgacatgggatattttggcttcaatgaacccctgaatatattggattgtttcagctcaggggtaagtctgatttgattcccgatattcttaggtaccgggataagttaaaagggatttgtagtgtcagatgatggaccatctcttatatattctatgtataatttgacatgcgcactactaaaatcaccttggaaagctaatgttacatacttattacccctggagattcggcttaagtctccctcgaccggggctgtgtcttaaccctctggtcatgcttattgttccttgccttgggctgcttcgttgggctcctgctcgatctcagcatcatcgagcccgtagaagttctcagggcggtatccgcgcttgtacatccgcgaggcgtcctcccaagcataccagcgttcacgcagaacgtgcttgatgttcttcatggtgcttcgaatctatgatgaattggatgggtcagtcgagttcaaataatctgaaccaccaattgatggtcggctctgaagtaatgaggaaaagtcttcatgcagctttccaatatatgtagatgaacgagatgacctatacagccggggaaaaactcaccaccttgtcccgttcctgagattcaaatccaccgtagccagcctggattctttctctttcgaaatctgacgtagcaatgcggtttcgttcacggacgcatacatgccacagaccgtgcaagtcctcccaactccgttcgcggagttcttggataccccacggacgacctagattcccaacatcagcactgtccatagagcattatagattcgacatccagaaaactaaccatgagcgttgtcataagccggggtaggtaatgcctgccggttggggggaaagaaggcccagagtccatggttggggtttgtttcccgcggctgcatgtctttcggcgacacaggtttgggcaatggccattttgacacagtgaacggtgttctgggaccggttcgatggatggccgatacaccacggtttttgcttttgtcgcgtcgagggttggcgccgacggaggcagtggaagaaaagctcgaagattggatggctgacagggtcacggaagggtgaagtgacggcgcgagataagtgggaggcaattcggcaataaccagccctctcaggcggctagcaatgcgtggaacctgctgcatgattgtgatggctttccccaggacggtccgagtcggagattgatggcctttcttttcgcgaaggcggcaaggctagtcacgtgacaaaaccaaaccaagaccagcttggatgctattagccttgggttcatcgggttcacgtctttttttttcccgagtcactcttgcttgttttgattccatctttattccagcaaacgacagcttcaaaaatctatcctaaagatatctttaatctttacattttaggccttgagctgcggttaattgcagacttggcctgtgcatccgcgcgtctaatcacccaatcgactactcggcggagcagtgccgcatcaagcgtgagcaagaggcctttgtggattgctctcccctccacagattcaactccggtctattactcggccagtctgcttttctgatttttgacgtctcctggggtatcggaaattaccctcttcttaagcaacatcgactatgaataggccaggttcgtcattttctttcaatgccttcgcgatccctcatgcctttcttatcttgcacctacctccgcggaatacttgatataagtcgtacttgcttctgtgctgcgatatactctccttgatagtgggagttacccagcattgtggaagcgctggggagtccaatggcaagccttggtgcatattgttctacatttgcgaccgagacattcgcaaggacatgcccatgcattcctatggtgttgatctgagcagctcttgatgcgacgatcgtgctgacttgtcacgcgtgtgtcaggacctggcccgcagccgctaagaggcatgtccggattccccacgcaacagcaagcacaagctcgaactgcatcattagcatccacgcgattgtcaaacgggaaactgggtgcgattgcctcgagtcatactttctggacactcaagatgatttgtatgaagggatgctaacatgtgactcgaataggcggcggtgccaattggagcttcaatctacctgttagtggatcatctggcctaccgggcagtcagcaacgcacaatggggaccatgggaagctttgcgcaaagcctaggaggatctcaatccgcagcaccacttgatctctcgtaagtgctcttttatcatggtttgcagtggtctcctgtatctctaggccttccgatttgtctccgaactgactaggtcggtgattctagggagttcccttcgctatcaggagcatcacagcaatcacagtcacaaactcccggtcagctaatgtgggccaacgcaagtcaacgcgctgctcagcaaacacctgttcaaaggcaacagctccccccgacatcgcaaaccccctcccgttcctcccaaccccaaggccttcctacaccccaacaatcccaaccgcagcatgatgacatgtttccctctggctcgcagtttgccaatcgactcgatgactttagaaatggtggccagggtattagtagtcaactcggtgcaggtggccaaccccaaacaggcaatatcgaagagtttccccctttaggccgcaatgctgctgcggagcttcctctcggtcggactggttcgttgatgcaaggtgcaggctttgggggttatggaactggtctaggggcaccccggtcaccagtcagtcaagtgcctaatggcattctaggacaagagaaagcagtatgtgtctacaattgactcactttctaggcagcactaactttacaacaggacttgaacaacggtgtgcttccaagccagcgtaactttagcgatccacaacaactgcagcaaaggcagccagaaaatattgacggacaagatgtttctaatgcggctcagaatactgagcaaccacccctcgcacagatgagtgaacttgacaggtttgggctggcgggtctgctgcgcatgattcacagcgagagccctgatgttgcaagtctggctgttggccaagatttgatgacactaggattggacttaaaccaggcagagtatgagctcctttgttcccataccatttataatactaattctttgcataggcctttgcacacatcgtttgcttcaccatttgtgtcgtcaatgtcagcagtccctctggaacaagacttctctttgccgggttgttataatgtggccaatatccaacccctccagtctcgcattcctgggtttagcgacgagacactatttttcatcttctacagcatgcctcgggatatcatgcaggaactagtggccgaggaattgatgggccgcaaatggcggtaccataagcttgagcggtgctggctgactcgtgatgagacatatcctggacctgttgatgtggaacgtggtgtgacggaacgcggcgtgtatcttctatgggattcctccgcctggaagaaggtccgagtaagtaatattcatcccttgttggaacttgaagaactggttgaactaattttcatcacagcgtgaattcatccttcgatatgaagacttggacaaccggttggatcctaatcgaggcgccgcccgcccacctggcgtggtgcatcatgcctcatgatttgaacttgataccaaggcgcatgcagaatacaagcaatcaaccatggcgttcggtttactggtctgtgttatattgctcagggatggccaatagtacattaaccttcgggaacaaggcgcgttgatttctttggtattaaagggctatgtgggaaaccaggacacgatatttgaaaatcaacagcctatgtgattttgtcacaatgctgtaaaatgctatacatcgctgtagaccactctattcactacctgaatggtttatccgtctagcaagacttgcgcgctgtagacagaatagccatccaatccgtatcgatgttcccatgtccgtaagtgtcttccaagtacttctctaccgccgggcggacgttatccgtgttttcctcccgttgcttctcagtccagaaggatttcatcaacacgggaagcatcatcatgatcatctccaccaagataggggatgtcagggtcagttttgttgttatttcgcggacatcgatgtcctgaagcccacgcccctcgagctgggactcgatccaaggctttgagtgccattgcccatcagtgatgacccccaagagctttggggcctcgggaaaaggcaggttgcctggcatgctttcaatcacttgtcgggcgatggggatccagccggctgtttcatgtcagtgaagttattacccaagagaatcgttccaatacttacgttggatccaagttgagaaagcaatagtcccgccgggttttagcattctgaccgtctctagtggtttctattagccttgaatataataaggaaatgggcaatgatatacttaccattgagagccttgagagactcagggagtgtcatataggctgcaaaagggacatagcagttagccactgtcagaatagaccggagtgcatccatgaacccactcaccaaaagcagtgaagatgtgagagaattgaccgctaggtagctcaggattctgcgcatccacaatctttgtctccgtgttctgccagccctcttcttgcatacggtgcatagtgtactcgatcattgccgacgagatgtctccacaagtcaacttccacatcttcttgacagtgtcatcaagcttgccattgagggtactggagataacaccagtgccacaggcattgtcaaggaccactagaggctgatcagggttggccctggactcggcggccaccttgctctgctcaaccagcgtttccgcaaatggccgggtgaccatctccgcgcgtctaaacgagctggcatattcttcgctcttgaagaaagtattcatgtcgactttttcagccatagttggtaaactgcaaggtaattgcgtatcgtagttattgaagttgataagtgcctgtttagaaggaaccctcaatgtgatgtgatgtgatgcaagaccgagatcatgaaaagatagaggtccttatgggtccaggctgttctttaaatagtctgcggtcgcctaaagctcacatggtttctgtaccagaaattgttgtacgatatagaaagtgtccgagaatgtctccgcgagtggatttcagtcgaggcatttgtaaaaacgcaccttcaaggggtatttagtaactagaaccccttactgcgccttatttcaatgctaccaatggaaattattggttgggggcgactcttacgcagtcacccccagggttccctcttggtagatcgtgatcattatgagtgtattggcaaaagaaggagccatgcggagtcgaagtaaaagcggcaaagtccttcacggataccagttatcaaatccacaattttaatcgtcccaatgtcagttaatgcagagaggtttaatctccagtcgccgagtgccattttttcatacttcgatatcacgtgagaacaaagcccccgcgctgacatcagcaaaacgacgccagacccaaatgggcaaaccatcaacagcgggtgcgggaaaacaatcaatcccctccactccccatctggtcgacctatgcactctgctagcgagcagaacaccgtttcggagtcgcaatcatgaggattactgaaattgtcatagatgtgaggttcaacattgctccatcgttattcactgcgctaactaggtcgtcagggcttcaaatcgtacgctgtgcgtacggtgatctcgggatggtatgcaatctaccgcgtctaagcatgaatgaaattatagttttggcttaatcttgggccgatcggatttgctaatcgcgcaatacagggacgaagccttcaattcgatcaccggccttaacggtagtggtaaatccaacatcctcgatgccatttgcttcgtgcttggtatcaccaacatgactacagtgcgcgcgcaaaacctccaagatctcatctacaagcgcggccaagctggcgtcacgaaagccagtgttacaatcgtcttcgacaaccgggataccgcgaagtcgccgatcggattcgaggagtatgcgaatatctccgtcaccagacagattgtgctaggcggcacaagcaagtatttgatcaacggccaccgggcacagcaacagactgttcagaacctgttccagagtgtccagctgaacatcaacaaccccaacttccttatcatgcaaggtcgcattacgaaagtcctgaacatgaaatcggtcgagatcttgtcgatgatcgaggaggcagccggcacacgaatgtttgaggatcgaagagaaaaggcaaacaggacaatgggaaagaaagaactgaagctgcgcgagatcgaagaactgctgaaggaagagattgaacctaagctcgagaaacttcggtcggagaagcgagccttcctcgactttcaacagacacagaatgacctcgagcgcttgacccgacttgttgttgcccatgactatgttcgtggtggcgagcggttgagagttgcaggccaagagtgcgaaaataaacttaacaaagcgcaagccctcgaggataacgcgatcaaactcaaaagtgaaattgctcatttagaggaggatgtgaaacgagtgcgcacagctcgcgacaaggaacttcgaaagggtggcaagttccaagggcttgaagatgaggtcaagaactactcacacgaattggtccgactgaccacggtctttgatctgaagaatgcaagcatggatgaagagaaagagaaacgacagactattcaaaatactgtcactgatcttgaaaaggtcttgaaggagaagcgcaagatctacgagaagctacaggcccagtacgataccgccaaagccgagttagacgcacaaaacgtcgaagtggagcaaaaggaggaactgcttcaaacattgcagactggcgtcgcttcaaaggagggccaagagagtggttaccaaggtcaactgcaagatgcccgtaatcgcgcaagcaatgccgccacagaacaagagcaaggaaagctcaaaatcaaccatcttgagaagcgaatcaaagaagaggggcctcgcgcaaagaaggcaaaggagcagaacctggggcttttgcgtgatctcgaaggcttgaaatcgcaggctaacaagctagagtccgagctgactcggcttgggtttgagcctgggaaggaggagcaaatataccaggagcaaaccgagcttcagcgggatattcgtgacctccgccagcgggctgatgggctcaagcgacaggcagcgaatatcgatttcaactacgcagaccctcaccccaactttgaccggtccaaggtcaagggcttggtcgctcaacttttcaccctcaataaagatcaagttccggctgcgactgctctggagatctgtgccggtggtcggctttacaatgtggtcgtggacagcgcggagaccggcactcagctgcttcagaaaggcaagctgcgaaagcgcgtgactattattccccttaacaagatttctgccttcaaggcatccgcggaaaagattggagctgctcaagaccttgcccctggaaaggttgacctcgctctgtccttggttggatacgatgaggaagtcctggcggcgatgaactatgtctttggcaacacccttatctgccaggatgctgagacagctaagaaagtaacatttgatccgtccgttcggatgaagagtgtcacgctggaaggcgatgtgtatgatccgtccggaacactttccggtggaagctcccccaattctagcggtgttctcgtgactttgcaaaagcttaatgagatcaccaaggagctacggagcaaagaacgacagcttgcgactttggaagatcacatgaagagggaaaagaagaagcttgattccgttcgctctatcaaacaaaatctggatctcaagaaccacgagattaagcttaccgaggagcaaattaacagcaactcttcgtcttcagtatgtgtttctcctaatctattcccgcaatttacaattaacctgaagtagatcatccaagccgttgaagagatgagagcaaacattgaacaactcaagaaagacatcgccgacgctaagtctcgccaggccgtcgcatccaaggatatcaagcaaattgagaaagacatgagtgaattcagcaacaacaaagatagcaagttagaggaactgcagacgacactcgataaactcaagaagagctttatcaaaaattctggctcggtcaaggagctgcagaaggaattgcagacttccagattagactccgaacaagttggaagcgacttatccgcagctgaggagcaattggttgagtcagacaacaccctcagtgcccaactagaagagattgaaacacaaaaacgagagcaagcacggctgaaggtatgtcatgccctcccaatactgcttaataatcatataactgacaattctaggatgcccatgacatcgcgcaggctcagcttgatgacgagagggccaagctgaccggctttgacgaggaattgcgagaattagaatcagccatgaaaagcaaatcctcccaaatcaccgaggacggactagaggcgcagaagctcggccatcagctcgagaagctgcaaaaggatcagcacactgctagccaagccgtggctcatatggaacaggaacatgagtggattgcggacgagaaagaacatttcggacgcgccaacactccctacgatttccagaaccagaacattgccgagtgcaaggctaccctacgcaacttgacagagcgatctcaaggcatgaaaaagaaaatcaacccgaaggtcatgaacatgattgacagcgtcgaaaagaaggagggtgctctgaagaacatgatgaagacagtcatccgtgacaagcgaaagatcgaggagaccatcatgaacctgaacgaatacaaaaaggaagctctctacaagacgtgggtcaaggtgaatggcgactttggacagatcttcaacgagctcttaccgggtagttttgccaaactcgaccctcccgaaggcaaagacatcacagacggtctcgaggtgaaggtgtccctgggcaaagtctggaaacagagtctgacagaactgagtggtggccaacgttcactcattgctctttcgttgatcatggcgcttttgcaattcaagcccgcgccaatgtacattctagatgaggtcgacgccgcgctagatctgtcacatacgcaaaacatcggtcgactgatcaagacccgtttcaagggatctcaattcatcgttgtctccttgaaggatggcatgttccaaaacgccaaccggattttccggacgcgcttcagcgaaggtaccagtattgttcaggcgttgacccctgcggatttgaaataagcgtgcatatgatcttggttgtctatagtttctttcttggtgtccccggtggagtgggatgattatgtcccggccttggtgtttggttgtctttggatgggaatggactctctcttatgaattatgtgtaaagactatatcaatttgttcataaatataaaatcctgcacaatatgcacaatatcagtgtcagcgtcgaagactggaaacttccaaactcggaaactccgatacccggcacgtgctcgattctcgacctgacccgtgccaccttccaacgcgcatggcgatttcattgaaatcacccccattgcgccaatacctatgtgtctcacctgaacatcacctatattagaccatatccaactcagcgtcttgcctttttcaaacccgttacggccagatatcaacactggggaccttggacacctcactcaacttgcgctctgccaaaacaaaatgacggacgaggagccttcgctgaacataccgtcgcttctcactctagcggttgtatcatattttgttctccgatggttttttaaccgcgatgaaagctccgcggggggaagccgaggtagggggcgtggcaatgtcgtcgatccggcgcaggtggaacagatcgcgcagatgttccctcaactgaacactcgtgatataatgtgggatctgcagcgtaatggcggcagtgtcgccgcaacgacagagagagtcctgactggacgggggctggaaacggtacgtgttgcgctgatgctgtcatcgatttccccaccttatctgcgtctcagacaactcgactcggccacaggcttcaaatatcaactgcaaatagtcagttatcgaagcattgactaattcactttcttagcctcctccttcgttccaacctccggtcgcaattccccccaccaatatcccgctggcgcagaccgccacgcccgtacagaaagcggacgcacaggacttgatatctcggtataatttgagtgcaaaggccgagagccctgctacagagtcagaacccgaaaagccttccaagtcctcttggtcccaaaataaggaagagcgccagcggatactgcaaaagcgtcgggatgatatgatcttggcggcgcgaagaaagatgatgcaaaagagccagggcaatgtatgatatgagaactgtcatgcttgcctgccgacaacgtgactttctgtacactgcttttgacgacgataaacctggccgaacccggcaccagtgtttcccgggggccaatataccctctccatcctttcggttttgtttcgcgacatcagtcctctttgtattaaagcgttcgcatgctccatggtgttagtcaaattggaatagtttcgattataaccgttggtcattgtatacggagggtatactggattatatacatgaaagtcgttttgggcattggtctgcgtcaggtatgcaccgaataactccgaatgaaagataccgccaaaaaagggaaaaaagcaacagcctgggatgattagaactccatgtaatcttcttcatcttcgtcccgggtgtcatcgtaggcaccatttgctctctgctcggccatctgttcacgccgagcctgttccttggaggacccaattctcctatgagccaattagcaacgaagtcccccaaatgttcggctatgcaagtatccgaaaatgggatcacataccgaagaccgtccaccacaccagtaacaaacccccgctcctctcccaactccatagaaccgacacccgtcagagcaacaccaccaccacctgtcgccgcagcatccagcacatcaacacccgacctcattttcgccatgcgcacctcacgcaggtccttcagcagtctccgtatctgatccgggtccacgagatcatcgctcgcggcgtcaagcagcatattcccaacctcaacccagtgatatggtagcgaagggggatcccgtgaagatgccacggtctgggctgtgttttggggtaagaaaggcggcgctgcatagtaccgattaccatctggtgtatattgcggccgagcagatggcagtgcatcgcggtccagaacacttggttgaccaggcaggggaggaggcggggagaaagcgtttttgtagtcttggtgttgggactctacttcgaggatgagagctaatggctctgggtgtagccatgttggtgggataatgtttgcgcgacgttgacgcttgaggaggatggcgagccagagggggagggatgcgcgtcggggcggtacgagaggttcaatggggccctggggatggttagatttgagtatttcaagatagagcagttcggaggcgcatactcctagtagttcgaggccttctaggcgctggcgaggcacaattgttactgtttccatctccgccaggaaggcgatttctgacgccgtgacgccccggggaagaggaaaagccattgggcgtgtgaataggaaagcgaaggcaatttcaattaatcacgagagtcgcgatctcatctctcttaggatgatctaggtcgtcttgatcgtgcgctcgaccttgaccgtttgctctgcgtttctttcctttcgctttttttcttcctcttattagaccgtttctctgcttttaaaatgctcaattgacttttattgaatgcttctttcaagtcgcgtcgagatggcgacttcgaaacgttcaaaacgtttgaaacgtttgcatcggatgagctccacaagctccgactgggacccggtggccgaagaactgcagatcgtctggcaactttacctgcttgctgcaagtgattatttgcacagcatggccaatcctctagaatcagacctcagccggagtgctcgatggttcgttccgtttggcttggtcttgattcttttgtgggtgattcttgtcaataagactgtccccgaagcctacctcgacgaagtcttccacgtcccgcaagcacaagcatactggtcgcataagtggatgcaatgggatccaaagctgacaacaccaccgggtctatatctgttctcatatgccctcttcgctattgtgttgctgctgcgcggagagccgacagagctcactccacaggtcttgcgctcgacgaacgttggtgcgacaaccgttattttcccctggagactccagaagttgcttgatacgctacagagaacgacaaatactcggccattgggagcgaacgtgtctcataccgtgctgaatatctgcttgtttcccccgctgttcttcttctctggtctgtactacacagatgttcttgctttggtggttgtcgtggaggcatacaattgggacttgaagagagactttgagagaaaccaggaaagcgaatctggaaacgacgcgacaaaagcgactcgcagtggtattcaggagacactgggattcctggctttcgcgctggctgcattggtcttccgacagaccaatatcttctgggtctcggtattcctaggtggacttcaggtagtccgcaagattagaaagtctactacgccatgcatgtcatccgatgtgtcaactatcgtgaaacaaggcctgcagaatgaggtgtatgatcctctcgtttcggaggcttccttcgaaggtgagttgatctattggatatacaatatgacgcaagcaggagaccattctaactaaatctatagattacctgaagaccgccgtttcacttgcgactgtcagtctgaagcagcctttttctctcctggtttcggtcattcctcacatcatcgtcctcgcggcctttggtgcatttgtagtttggaataacggagtcgtcctaggtaagggtgacttgttttgtcacatcaagtgcgattttactgacagttactattcactaggccacaaggaattccatgccgcgggtatccacctggctcagatgctctacatctggccgtacttcatcttcttctcatggcctcttttcgtcattcctctgatcaatattctcgccctcaaaccactccccaaatacttgaacctcggtctcccgccgaaacagaggaaatatcccaagctcaaggctgccctgattgtgatcccgtttatgcttgccgtggtccacttcaacaccattgtgcaccccttcacccttgctgataaccgacactatgtgttctacgtattccgcattcttatgcttcacccagcaatcaagtatgctgcagtgccagtgtatttcctctgcggatgggtcgtgatctcagcctttggatttaccaccatccaacgtccgcccaaaaccttgcgagttcataaagctgctccagatgcgcccccagctccgactccggccccggatccagccccggccccagtggcacaagagcccaaatctactcagtcttctgcgcgcaagcctttactggcgcaccaacagccaccaaagggaacgaagaagcctaacaggtctaattacaagaaaatcaagaaggatgacccagaaaccaagaagactgacttgactgagctaccagcggagattacggatccaaatgatcccgcggttctggctagagtccagcaacacatcttcacgcgccagagagaattactggaggcaccacgcgttagctttgtccttgtttggctggccgctacctccttgtctctcatcacggcaccccttgtcgaaccccgctacttgatcatcccgtgggttatgtggcgtgtgcaccttcctcctacgccatgtctgttcagggatcgagatattcgcccccgcacagaggaagctaaacgtcgctctgacctcattgtcaacggaccgaagttcgtggagacggtttggttcttgatcattaatttgatcactgggtatctcttcctgtacaagggctttgagtggccgcaggagcctggcaagatccagcgcttcatgtggtgatatctctgtatctttttcttttgatattagttttggcctgccttggtctggtcgcttgtacaatagaaatctaaatttgctagtttactcttctgaaagccattgagttttgttgtgatattatcttggtgtatccaaagcgagcttcattgtgttcggtgatacctacatgtcccgcattccaatcaactatctaccaaaaatagacactcttccattccatcgtatcgtcaattatgtctactgctggctcttccacgcggtatatttgcggtaaatatcatggcggaaggtttgctttagctcggccaccaactctccatcgaccggcagtgctgcctggatggcaccgacaccacagagattattcttccgatcaatgaaccaagtgagagtcaaaccaccaccccaagtcaacgttcgctcgccataccagccgtcaacatcctcaagcgtcagcaaaccgccaaggccatagccaaccttcagctccgaatctgttccaacgcggaaaaagggcccaagaggactagcaagcgcagcttgatggcttgccgccgcctcggggccaaggtgttgctgaaacatattgtcgacgacagcaggcgtgagcaacttgccatcattagccagcagcgagtgcagaaccttaacaaaatccgagccaggtaagaacagtccatgaccgccaaaggcaccacggccccgcaggttcatctcgccgccaccgccgagcacggcactaccaacagccccagggtcactgggattgagatcgacgagacgggctcgcaggtcctcacgggtagcgggatagaactgagcatagttgataccgagcgggtcgaagatacgcttctgcatgaagtctatcagcgagccgcccgtgacacgctccaccacgcggccagcccagtcaagaccggggccgtacatccagccggcaccgggctggaagctgagcgggtaagtgaacatctcctcgacgaggagagggtcgtcattctcgggattcccaaactgcgcgcgccacttggcgatgggcgggttcaggaagtggtaggaggtgccggagctgtgcgtaagcagcatcttgagggtgatagggcgggctggtgggtcgagctgagggcttccattgtcggcaaagccagtgagaacttgctttgcagcgagctccggggcgatggatgacaggtcgccgtctagacttagtaggccgtcttcgacgcactgtagggcagcgatggttgtgatcaatttcgtggctgaggctaggtacagcacatcgtcgagctgctgtggctgcttctggcctgagagtagagtgcgctctccgatcgccttgttgtagacaaagtggccttcggcatcagtggcacagataacagcgccgttgatcttgccggcgtcgatggcggattggatactagcttccatattttttggtgaagatgatattgatacacagggtctatcaagttagcaggagggcttaaataactatgtagaatacctacaacacaggtatcagttcggcgtctatttttggatgctcgggctctcttttgagactaagtcaaaaggttattgtagtactccgtacaatatacatcacatttcaggccgttcccaccgcctatattctacctataacaccaataaggtggggaaagacatctcaacagaatgtctgatctgagaacatctaagagcacaagcaaaaacacaaccaagatatacaagtgtacggagtactccgtatatgtgtgagaactgtgaaatagcgcccaggcactacagatcaaatatgttaggcggtctgattctgccggtcgaccaagctgttcaccgatcaggaaggcggtaccattatgcagaaaagtggggttatattgaactgtaaggatgtcctttcgcccttcggggcatacggtgaaaagaaaatatacagagaagattagcatggcccctgcactaaggatgacacgctcaatcaaagagaagtaacccattttttttctcttttacacgagctcaattgatgagatagagtgcaggctctttgtatacattattctactactccgtatatatttgcagatactacgcatactacgcatagaagtcacgtgttaatcgccgttcgactctgcacgttgtcggaaatggtggttttatttaagctctaccaggttcacctgttaactcctacccccaaatatgagtacgctaataggtgttcctgccctatccaagttttgtttatacattcattctcattccattgtttgtcatataatctgaaatccaggtaggggccaaagtggtgcactcttccgccagaataggctgtgaaaaaggtgtaaaatgtgtaaattgaatttgtctctgcgatacaccaatagtatcgttgatccgacgatcatcagaagaatataaggagccaggtttatattagtacaagagttcaaagtatagagaatgatttggagtatagaaagcaagctatggagaacatgtatcactgggtatactccgtactggggtctgttttagaataaggttgttttatgtgggtccgctaaaaggatcgaaccagggtcccagggccacgggataaccttcgaaagagatttatatgaaccgtgttaagatattcttttgagacggtatatgaacttattcagttattcagtctagaatatacttcctgcatccgttgaatgtcatcgaaattgtttcgttctcatatttccaaaacttcataacggactagtcattaacatgcaaaacccaacagcaactctatttttttggcgcacacgaaacggaagattccacgggtatttgtgtccacctagtcttcatccatcgactcccagccatcaccaccacggggctcaccctcatcaccctccccctccgaatcatcagactcgtcatcatcagcattgataccaaccgtgcgctccgggacatcaccagcaaggtcaggcatgcgagacacaaaagcacgccgaacagcgccgttagtcgaagcatcccagatctgcacattacccttgctaccagcaaccgccaaccggaagctgacctcctggtcgggcgcgaaggtagtagagaacaccttgccgacctcaagcttgcgcgtgacaaccaaagtgggcttgtcattctcgacgctccacagcttgacggtcttgtctgttgagccggtcaccaaaaagccggggatagagctgttgatgtcgaaggatgaaacggaggagtcgtgtgcttgcagagaccagacaggcttggactcggcaggggtggcggggacattgcgcatgtcgtagcggtagaccatgccgccgtcggtggtcacgtagaagaagttggtgtcatgcgggtcccagcgcacacactcgacgtctgcgtcgacgccccagcgcgcctgggcgtccggcgcacgcatgtctgctgccactacggtgcggtcgtaactgccgcttagcagaatggtggactcggctgggtgccagtctagtgagcataccttgtccttgtggttggagtaggacttggcgcaggtggcggtgttgagatcccagagcttgacggtcttatcggctgatgccgaggcaagcaggttgcggtgctgacggttggcagccagcgccaggacggcatcgatgtggtactcgtcgttggccttggccttcttcttttgcttcttcttcggcttctcggcgtcctggccaccctgcccaagaatcgcgttggggtacatgcagtccactacatccagatcccagatctcgatatcgggctccatggttccaatagccacgaagtttccttgcgtccgaccttctgggttcttgccaacaggaatatcaagccactctgtgcaaagtgggataccgggaagcatgatgtcgtggtgcacatagaggttgtccgctttgtcttcgtagacgtagacttccaagtgcgcaacttcgtcctccacctttccggccaacagaaggttgtcgtagggcataatctggagctcctcgcgttcttcatcatcctcgtcttcggggatcacgaggtacgggtcttcctcgttgggctggtggtaggccagggattggacattgccgaacatggtgatcttctcgccatcttcatcaatctcctccttgtcgtagttatccatgtcgaattccttcaacacatcatcatcactgttaaatccgattagcatgagttgaatctgcgctgcgctcaacatcactcacgtctttgaatcggtgtccttggccgaggtcttctcctcagcatcctcctccatagcatcatcgccttcatcttcagaaccatcctgggcagcattcatatcatccttcgcatcctcgagctgcatgcgcgcaagcttagatatacggctcatctcggcctcgtcaatctcatatttggtagggaactgggcggcgacaccacgccgcacccatgtcgtagttgtaatcatggaagacattatgaaaatgttgtgacgaaactgatcacacccgtccactttttttctatcggcgatatttttttttatcgtgcctgaggggctgtccgcccggcagaatccggccgatctccttaccgcccggacgttttgcgatgttcttgctttgcgttgatcatacgattgaacttgaactatctttcagttttcagagaccagtgccattgaaatcatgcattctcatctccatacctcttacaatgccagtacgtcgagtccaccatgcccggaagatccatctcgccatcccatcccgctttccatattgactgatatcacacagattgcgaagagatcatgactgctctagatgagtgtcacgccaagggattcctacacaaagtcatcgggagctgcaacgatattaaggtcgacgtgaacaaatgtctctccgctgagcgatacgagcgtgcaaagcgcaaccgagaggaggcgcgcaacaaccgccggcgtatggaggagatctgggccaaagagcgcgagcttgatcaagagcaaggagggcctgcgcttgcggctgctagggcggctactgcggcggcggcggcggctaatgctagtgctagtgctgcgaagcaataggctgtgtcgtggatgagcatatgctatcatatatgccgtcatgtttgggactggagtttggggtctgctttcaatggctgttcttcgatttggctcagacttgaaagacagcactgctgcttgttattagtagccttcggcatggccccgatttcaatatgttcacgtgagaacattgaatgcacgggataagcagaccgaggccaaattatctccttttatttcatctggggaagaatactttgtacgatatctgaacgttgaaatgtacatatagccgagtgaccttcgctctgtcttctttgccatatttcatctggcaccaatgtccaacacttaatctacagtttgttggggttataggatctcttgaatgatatcagatgtacattactattatgcacatcagctgaacttttagatataacccatccgatctgaacgccgcaccccagaagtgaaataaggttgagaatgcatgcaatgataaccagcatcatgaatcgcctatgccgtaaagattcaatcaagcgtcaacctccgtagcctcattaggctcggtggcctcctcgaagtcttcacggggaccactcttagcatgacgacgtttcctcttgggcttagccgctgcagtatcatcgccatcatgttgctccgttgcatctgcgatatcaacctccttccgagcaggcttatccttcttcggtgcaggcgcatcagtcttcttcttagccttcttcacactgagaggattaggcgccttgaccctaggaccgcgcttcttcttaggttcctcctcatcagcactctcgccatcagcctcgccatccctcttgcgcttgcccagcatgggatccgcatccaatccagcgcggaacttcccacgctcaacaccatcccgcaccatctcagaagcgctgctcatcggctcgaggaccataaccgagcgcttaacgtatatgataggcacacctggaatagagcgagcgccggcgcgtaatgcgcgggagcggcgcatagcctcctcttctttacgatcctcttccgtcttccgtctgcggggctggttctcgctattggtcgtctttctcaagattggatccgcacatgcgagaatgtagtgctccttgttcttctttgagtctgcgttgggtgaaagcagcgagaggagacactcgacttcgtcgatgggcgtggagtccgcgttgtgcgagcagtggcggagcgggagttctgtgggcggaggaaggaagagaggtcggtatggcttttcggttttggggttgatgggttgtgcggccatgatagcggcgagtgagcactttgttaatactgtcgagatggttagctgggatgtgtcttggtggatgggaactttgtctggtgagactcacgaggcttgaccttgccttggatcgttctttcaagtgcagggattagttccatcctgaaggagtcggtggcgcgaaggaaattcgagtcaactgtttgagcgcaagtcagtactgtacaccagaacaatatattgaatgggacatacccaggacctgataggcctctcggaaaccgaaagtgagctcatactggtgcataagcttgcgatacttctttgaacgtttggccctcattgtgaatgatgggtatcaagtatttgaagattgaatgcagcaaaagacatgagcttctgcgtcgaccgaaacttttttcattctgccgggcgggagcggcggtgatgtggtctgtgctggtggtgaggtacccaatactttgtgaagtggggcgtctagccttgagattgagtaccctgtacttagcatttactgatcgctacagacttgaatagttatgaaagaatgtattgagtcaaggaaatattattatttgtcttgtttagacttaagtagctatcaacgatggacagactagccacatcgcgctaagtaatggagtccctcatgggtgtaaatcgaaggaaatgggtctcaaaagtggtagaggggttgttataggaatcaccagcttgaccggttggcatcatggctttggtgcaaaccgccaatgcacaatgtgcgcttgttagaaagttgcccgagccgatggaagataccaacaggtggggacatgatgaccaggcaaagctaagcaatcaagcttcgcgctggagaactcgagtaacccagctggcatggaagccatttcccgtggtttgatggggtgagtatttcactgcaatgcatgtccgggtcctgattcgacgcttgcaaggcatcatagctgcgcaagagcgatgtagttgggacaagcttttggcggtagatatgtgaatctagatgatagacggggaacaagagcttgcctcgtgtgtcgaggttcgtcaatggcaattggcgcacgtccgaggcaaggagatcaagacgcgaaattcaagatggatatttgtgaaagtctgatcgtaaaaccaatgggtgcatctcatccatcccgtttcttgcaagatgcaaccacaacagagatatcgtccattttccctccttgaatagccagaccctcatccactgccttctccatgtagggactctccgcaaagggatcctgggcaatcgtgagagcagcattgagcagttccctagcaacatagacattgcggctatcagacagatgagggtgctgcgcaacattcgttggcgccgcgcgctcttcctcccatttgtcaatactgtccataacgatcttcaggacctcatgctcccataggttatccatgacgccatccgagaaggccaggacgatgtcgtcttcctgtacctcaattttggacaagactgcatctttccggggtgtgtcgatactgtttgttccaagctgcatggggcaatcgaaccaatgccactgctcggctgtgcggaaaatgacctttttctcgctcggtcggatcacgaggattttgcaatcgcccaggtttgtaacgtacagcaatggcttctgtgtgccgtcttcgccctcggtccagtgtattatggcagtcaccgaggttgtcgtgccgagccactcggtaggagatgtggttgcccgcaaggtctcctcgaatgcatactgcaggtatccgaccgggtcgatggcaggcgtgctgtggtcgacattcctttcgacctcgagggcccagaagtgtaataggagtctagaccagagtctgtatcggggaagagaaaagtcagcgatcgtggcatatgataaaaattgaaattgagaccactcacgcagcatgaccacgaggtttcgtagcccaggcgcctacgccatcgttgacacctatgaaattctctgcgacgatgatggcatcgtctccgttgttcaggccacggattagctcgccctggacggataatctcttatcctggcttagcccgtgtgtcgtcaaaggatccgagaaggatgaagagggtggggagaggaaaggtggagggaagggtcgtgaaggtcgtttggcacatagagcgtagccagtctcgaatcgaaaaggcgatttgggagaaccgactggctggtcgggagtgggagtggtgacgccgtaggagggccacactgccgccgcgtgatatggccgtgctgtgctcggttgtcggaggcgggcactctggactgtggcttgatttatgcttatgttcacgatccacttgctaatggacgtccatgatgatgatagtgagtgtgacacggctgctgccttggtcaccatccctaacttggctctttgtgcaccaagatgggctcggcgaaggggttctggggcattaaggcatgaaaggtgcaaaatgaagagacggagtacaagagaacagtagaaaagaagttttgactcggacctgggcttgagggagagaaaagaaaagtgcgactcaccggtaaaggccgagggtgtctcgaagatatcactggtctgcgccgccgactgtgccttacactacgtagtatctctgagaatatgaaaatcttagaaatcgcgagtttttagggttttattcttcttcttacttcattctttcattctttttctcattctttctcttatttccgttacatttgtccagaatctatctttttttcagagcagttgaaccccgccactcttagggctacatccacttatctatatccctgccgatccaatgatccgctcagaacttgtcagaacctgtctatatatatccctgattcgccctattgacacatatgttgcagaagagaatcgagagcaatctcatagttcacatgctatcagccaaatcagagcaactacatcatgacctcaaagtgaaccacaaaagcacacatagcgaggaatccgatgctaacccagagagcccaataattctggataggaacagactaatgatcatcggccactttcgcgggtggcttcaagcagcaaatctataaatgtcttttggtcttcatccaattgcgtcatacttaaccactactactatatgataggcggcggcgaagcctgagcttccgagggaccctgtcatgtcacattctctctgcttcattggtctctttacttattctatcatacaggtactcaccaagaagtctttctctccttattcttatactaaccttagaagccttctgcgaaagaatcatgggactctcgaataggagtatgacttggcacttcgcgggcgaaacggatgtctgtctacaatacgggttaaacacagaatatctcttccggttccgagccatggacttatttcttgcagagcatgccctacttgaagtaacgcagtgtgaggaaacgttacaccatagggttatagccttacagaaggctacagctatcgagtctaatagggcccagcttgaagaagcaaataaacagctcgaagaggctcaagcgcaatacctagaaaaagaatacgccctctatcaagcagagtatgcccttgatatgcacgctaaagatgcttatgatagcttaaggcgtgatgctaaatggtttatgcgcgaagaaatggttcaggattgttcggatcgaggcggctgttgtagccgggaatgtggatgctgtgaacagagattatctttctgaaaggaagaaaggtagaggccattgcactgtagagtgcgggtgctgtatcggcttacgaggattcgagctttcaaagaaagacaaagaagaaaggagcaaggacttgaaaactagtcttgaaggattgtattcggcctatgctttacatttggcaaattgctatttttgcccattaaggaaaccctggtctaccgaacagatcctcatcatatgcttcatgtttacttcctcgcttattggcttacttgctgttatcttgtttacttgaatagattgtttgttagatagctacgcgagaagctttgaggattgcaacatttgcaaagtaatcaactggctgcttccaactttacagcttgcttcttctttctctccatcttagtgattctatattgaaagcgctcttctatctttgcaagacctggcacgtcacaggtgcagtgagaaatagttatgatgatacctataccttgctttagaatcatttgctaaaataatagactctttttattgtaatctatacctactcactatgatacactcggctgcatagatgtgttcgtacttacacttgaaagaaaccatcgccggtatgatctctggttcttcatctgcagaacctcaagaatgtcagcaaggcccatccatctatcacaccgcgataaccattgacggcctgattggtatttccagagacggcaaacctgctcttaacgcagatatggtccagtctgtcgacccatctacacaggatggcatcgcagttgtcaaatagcgggagtgtccgccaaggcgcctttattcgtagaggcgctctaccagtgcgggttgaacgctatcgatggcagccatagtattctcgccccggctatgtccacctggtacctctctgtagacattagagcagaaaccaaggaaatcaggaatcaaaattccattaatgataccaaacgaaaatacaaaaactaacgagtccttgggaaaccatggttatataattaagagacaagaaacaccaaggccaaaccaggccaaaccaatagtatgcaggtacattataagcagggggtgacggcctgcgggaggagaaggatgagcagatccaccatttcggccggttccggggtaggcggttggaagaaaacaaaacagaacataatcttttctgaaatatcctcttgctagtgccgtggccgaggtattggaagacgtaggcagcatacagaaccaccccgaccacgacaccacatccttctctcaacgcctaatcactgcccttgtctttgagggcgtggaagatgtcgggaatggttccgacatctccgggctgaggagccgggcggcatttctgcggtggcacggcaaactccactgactcagagtctgcgttttgcactaggggaagatcgtcactggcgcagttgtcgtacgggacgataagacggggaggggtaggcttcttctcttccgcttcctgctcgcccgcgtccacctcgcctgtcgcgggggactgggccgtgcctggctgaagagagagggccgttcgggctagagacaggcacttttagtgagtatatgtctctcttccaaggcctacacctcccacgggtactttcaaattaccccaccaacgactttagccccagctcctcatccttctgttcgaagtaattccgttggtagttctcgagggccctctggccatggaacctacagacataaccttcagcacgacaggcatagcaagagagaacgaatgagacatcacataccgcaccaccaatatcaaacccaaaaccacaaaagcgaggccaatgaggctaatgaggggagctttccacggttgtgggtatctctccgggcatcggcattggttggcattcgactccattttgatatgatagatgatgtgacttacaggcctatagttcacggggggtattcctatatgcccataagcaggtgtgctcagaggcaggtacatctgggggcaagcacacccggtccttcagatcaaagtgagtatcgcttggtttgatctcaccctcgcctacgggcgactatgtgtgccaccggtacacttctaaggttgcatgttctagatacaattgcttcaacttgcctatcatattcaaaatctataaattaattaacaaaactccactagtgtatgcttcaactggtacattttctatctaaagaccaacaggtagtacaaaaaaaaaaaaactaaaagtcagagaccctaaaaaagacatcagaaaagccatatatggaatctgttaatcatactgtcgagtcgtaaacaattgaaccgtaggtaagcctgataaatagaggaggctctagatcccgaccaatcaaaatgcaattatctccagggttggccgaccttattttgacctcatctccacagaagtacggtttgtctaacttcggctgcatcttaaccggcctggcaccaatcgtcgagctgactggaagctggagagagcttcaaaataccacaagttaccggcgaagattatttcctcgtcaatactaagctattattattaaggcaggggattagtgaagcggggtaatccaaaatctatcacttattatgggtccctagcctcgtgctctattgttgatgaagttaaaccgtcggatatgggataggtgagtctgtacataacatggaatagcatctgggggttaatcaagattcattttgaaactggatatgtagacttctcgtggtcacttcatcaaataaatgacatggttcatgatcagtttcatatctgtcaaatgatattatttccccttggcttccccttgcttccctccgattgtttcttaacaatcccccggtgggattgactaaccgttccttctttcctcctttccgttatgactttgaaacgcggatgaagagaacccatttctctgggaatcctcgcttgtagtccatcagctgagctgaaatgtgaatcgtaaatcgtagtcgtagctgtcgtaatcataagtcgtggttaaagtgacaggactgcaatcttagaagctttcctgggagcctcccctggaagtcatctcgcgttcccttgcaatcaacagagaaaacagttcaaaagcatggttcaatacattggcgatatcagcagccttgacatcacgtttgagctcagccaaaccttcgaagaacatgcgagcagtggtagaagcagtagcagggaaagcaggagctggtagattccgtctgtatgcaagaccacgcttggtcgccatgatgcgtacatgtcgttctgcacaaggacagtcgcggcgattcttgtcggtacactcccaggaacatccacagatagagttgcaaatgcactttcgtcgcctggcaaggttgtaaagtctagggatagactccgtcctgcgcaattctccgatggttgttcccagacctttagcagtatccgacaagcggttatctttcacaacatccgtgtcccagacagtcgttggcacatcctccaaggggatccatggcagctcctcgaatggaacgtcgtcaggcggaatactcactggagtcatagtgagatacttctccgacattactgccatggtctctgctgggataaggtcaaagaatgggataagtcctttccatttctgacagtaggctccctgtctgtaggagacagtcctcattgcaaatgggcggtatccgagggggtcaaagaaagggacctcattctggctcttctttttcataatctggttgatgtatccttgttggaagtaggcgatgatgtctgtccgaaggattgcgcagatctctggagagtctagtacttccttgaacgctaggacgatgcggtagagatgatcagcctctggcataaggaatggcatctcaacccgcaatgcactagtgtcgactgggtaggaaccgcagagctcaatgcaggccagctcaattgttatgcgcgcatatagggcatagtaaaggttttcgacagtgtcaactagcacagcaatcttctgggagcgaatgttttgctcgctgcgtctgatccagtatggcagaccggtctggtagttgtccggctaagagtggaaactcggcgttagctgttatatttccaagaaaaaaggcgtaaaagtatgggacaagagtaaagttgtaagctcaaaatatacctcggcgccgtaatacaagaggataatctccatcatcttcgacattgtatacaacttgccgaaaatgcgcacgatgacaccgagatgaatcgattcctcaacaggatccatgttttcggggaccacgagcttggttggggttgtgggcgagggcactgatgggaccatgacccaatcgtcactgctgacggtgtagaggcgaaggcggcgctggccgctagatgcgagctatcataagtcagggtcaaatctctcaaaagtgaaaccaatgcatgacgtcaagtcagttaccaatgtctcagagaatcctgatctgtcaacaagcgagccaaattcgaagggtgttcttccctcagatatagtggctgaagttgaggagatcattgaaggcatggtcaagctgctgggagcttcggccttccgggggtgatcggtaccgtctgagactatggacaatgcttcctccacaattgactggcagtacttgtagaaacgttccttcatccgttcaatctcctcatgtggaggggcctctccatctttgacgcgggcacaagcctcttccataatggccttggtggcctgggcatacgcatcaatacagttcttaccccgttggataaacaaatccaagtcctttcctgacttcagagcattcaggcgagccatggaaatggtagaagccattgctagaggatcaagattggcattgtccgccatggggacagttgggagaggagtgggtgggaacatgaattcagaataaacaggggcatcgtccgacacagggcgctggaaacgaggataaacaagctgtttgtcctgggcaagcgcacggggagtctcttgctcacgtgtagcttgagttgcagactgcgaagactgcgaagactgtgaggtctttcgtagtttgccgagagcagctccccatataccaggtttgtggttgttaaccatgttgaatttctggtgtttttgtttttcaatcacagaatctttgcagtgtgggattgtgggagaaggaagaaaggaaagggcaggtacgtgggtatttatacttgcccagatcatcagtacaattgtccactcgctcgatcacatatggcgaacggtccatatcaggcaggcgcgactcacaacggcaaacgccgcaacacatttaaccttaaatgggcaggaccaactgcgcgcttcgaagcctgacgaaacattgtgcatataatgcaagtattcatagatgtaaataggacatgatttcgtaaacgcgttcttcgaacactggaagcgtctggagaacctattcgagtgttggccaaccttataagccaaccttataactgaaagcacctaggtagatccatggatgtgtgatgtttgcccaatatatcggcaagccaaagccaacacctttccaagtcaggtccgtatgagactatcatcaacgaagtgaagcaaggataccggacatcatcacctggtgcttgtggggcctcatcttcatcccgagcttagctttggcctctttttcggggcttgtctcggttccacgtacctgtaaggctgatgtttccccagccgggtgcttcagaggctgaaaatctggagatcgacgcagttcaatacaacatgctatatacaaccaccctaccagcttatcagaaccggagactgtcttctaagagggcaacatgaacatccacctgtgtacgttccagatcgcctaggagcaaatgtgctgctaggtagcatgggaacaaggaaaaagtatataaacaataacaataaacttgaattggctcatacaaacaaagaaactcaaggctctaaccctgcactcggaacgtacgaccactagcagtcttgcgttcacgttcttcattctctggccgggctcggttgagcactgttgcgagttagcagtgaacatgctttctttgctcagacgatacataccctggaggaaatccgctgtccgcttcctcattcgagtgtggatgtaggcctgcaaaatgtttagtgatcaatccctcaacaagaccgagagaaactgcatacctttgaggctttgatgtggtagtggaaataatcacggaaggtctggatgtgagagatgttttcataacgacgctgcggggtcaggtgtcgagggaaaagaactgcaagccgagtcagtaataaaatggagattgatagcgcaatatgcatccataccgaaggtgacatagctaacttcgcctccagtagcattcagaccaggaacgtttgcaagctcaagaggagggtcgttacggaacaggacctggggggcgttctggagtgtcaagacacgtcgccgggcgtcgacgaattcctatgggctgtcagtcaggggttctcataaatggaccacttgtggcaaagtacgaacctgcaggaagaccttgccaaagatccggtctgtctcctcgcggaatacggtgctgaagatcactgtgactcggtcccagttggccttgatatagatggcctcctcttcacggtagtgaatagccataacttcaccgccctcctggataccctgtggtgctgactctgaggtgtacctggaagcctcctcggcgagcttgttgaattcgtcgaatgctttctcaaagggagcagccattgcattccgtttcaggagggcaaggttcataatcaggtcatttcgggcctcctcctctgcgggcaggttttcaagatcgatttgtaccgagaaatcatagccaggctccggagatacaatataaggaccgtattctctctccaacacctcctgagctccatactggaccagttccttgtagcatttcacattgatcgagatgagaatcttggtcttagactcgggggtagaaaggtgaaatgtcacaccgtcgaagtcggaaaccacttggtcaatggaggttgggggtgctctgagttcggcatgttagctgggtgcctgcttcggggttgtgtatacaatgcgcaggatcgcatgccgagggggaggaataaaacatacccagaaaagcgctccgtaaggagtgactggatcaaagcattctggtaatctaagagaagcatgacgggcaggacaatggatggtattcagtgcagataggtggctgttgtgaggtcgaccgtgatcgtcatgggcggtgggggagccggagaggtcgctgtcgccgcccgtattaattttgtcctatcgatagcaatcggagattccaaaaattttcccatccaccctcaacgatggtgaaatcatacttgtacgtacgattttaagtgatttggaatcctctgatctaagcgctaacccttacacagtaagttcgagcattcgaacacattcgggctcatcgcctcggcgtcttcgaatgcggtttgggccaaagatgaccagattggcattgcacgccagacgggcgccggacgagcaattgtcggcgcaggtgaggaagttctatgttgggatgtgaagaagggagaactccttggaagatggcgcgattctgcctgcagagcgcaggttagtgtgatcactcagagcatgacagatgaagatatcttcgcggttgggtgagtgtcctctggtgtgacctagtcggatgattctctctaactattatgtcccttctcagctacgaggatggaagtattcgtctttgggattcgcgcaccgctacggtcattatttctttcaacggtcacaaatccgccgtcaccaagttggccttcgacaacgccggtgtgcgcctcgccagtggttcgaaagataccgatatcatcctctgggacttgatcactgagactggtcttttcagacttcgcggtcacaccgatcagatcacatcactacacttcttgttcccctccccagaattgctcactgcttccggattgaatgaacactctggattcctattgaccaccggaaaggacgcattgatcaaagtatgggatcttgcctctcagcactgcattgaaacacatgtggcacaatcgaatggcgaatgctggagcttgggtctttctcctgaccaaggcggatgtatcacagctggtaatgatggtgaacttagggtctggtcgattgacgaggcggctatgatggagatctccaaggagaagctgggcgcggatggtcgccgaattctcacagaacgaggaactttctaccgacatggcaaagaccgcacaattggcatccgattccacccccgctcagactacgttgcattccatggttccgacaagtcagttgaggtttggcgcattcgctctcagtcggaggtacagaagagtatggcccggaagaagaagagaagaaaggagaaggaggctcgcaccgaggagaacgcaccggaagaggataacgataagcccgaggatgtttccgccgctcctgtatcagaagtctttgtccaacatgttatcgtgcgaactggtggaaaggttcgttcctttgactggatgaccaacaagtcaagtggcttgaaccttcttgccgcaacaaccaacaaccagcttgaagcctacaacattgttccagcgaacaagaagaacaccgacagcgaggatccggactacactcggagcttggcagtggacattcctggtcaccgaacagatatccggtcaattgcattgagctccgatgaccgaatgcttgcctctgcttcaaacggcactctcaagatttggaatgttcgcaccgaaagctgtctacgaacacttgagtgtggatattccctgtgttctgcattccttcctggtgataagattgtcgttgttggtaacaagaacggagaactcgaggtatttgatatcgcatcctcaacattgctggatactatcaaagcccacgacggacccgtgtggtcacttcacgtgcatccagatggcaagtctatggtcagtggaagcgcagacaagacagccaagttttggaacttccaggtcgtccaggaggagatcccgggaaccaaacgtaccactccccgcctcaagctggcacacacaaggacgctgaaggtcaacgacgatatcctcaacattcgtttctctccggatgcacgacttctagcagtttctctcttagacaacaccgtgaaggtcttcttcgtcgactccctgaagcttttcctcaacctttacggacacaagcttcctgttttgagcatggatatttctcatgacagcaaactaattgtcacttgctcggctgataaaaccgttcgactctggggtttggactttggtgactgtcacaaggccttcttggcccacgaagacagtatcatggcagtggcattcgttcctcacaacaaggatggaaacggtcacaacttcttcagtgcaagcaaggaccgcatcatcaaatactgggacggcgacaagttcgagcaaatccagcgcctcgttggtcaccacggtgagatctgggcacttgccatgagtcgcactggtgatttcattgtcagtgccagtcacgacaagagcatccgcatctggcagcaaacagatgagccgctgttcctggaggaagagcgtgagaaggaaatggaagaggcttacgacagcacactcaccgcatccctcgagcaggaggacggcgaggacggcgagaaggcggaggccgtcgatgctggcaaacagacgaccggcactctcatggccggagaaaaaatcatggaagctctagaactaggcctcgaggatcttgaagtcgtacgcgactggcgcaaagtcaaggctgccaaccccaacgccgccgcgcccgatcgtaacccagtttacctggctctcaacaacgtctccgccgagcagcacgttctgaacaccgtccagaagatccccgcagctgcgctccaggacgctctcttggttctaccattctccaaactccccgctctcttcaccttcctcaacatctgggctgatcgcgaatggaacgtgcctctcacctgccgcgtgttgttcttcatcctgaagacccaccaccgtcagattgttgccagcaagatgatgcgccctatgctcgacagcattcgggtgtcgctgcgtcgggtccttgcccggcagaaggacgagatgggcttcaacctttccgcattgcagttcatcggcaaccagatccgagagcagagtgtcacggactatattgatgaggatacctgggaggagcagcaagcttccaagggcacgggcaagaagcgccaatttgtcagcgttgcctgagtttaggattaggtttgtgtacaagcatgtctactggcgttgtgatcattttcgacctcattatcttggaggttttctctatgttggtttccatataaaagttttatatccttgggagttgaagagaatataaggaatgtatgataattcaatttcgaagtgaaatataaccttttctctgggataattgtccactgaaatttcatagacccaagtgtatcaaagtaatagaatgattcattcaattggtctagctattatattcccctacgtgcaacaatccaagcaatccataataccggaaacgaatataaaatctgaattgcgagaaacatcgttagcgatttactccaagcaatgatctgtccaagaccacaaagaaacaacaagcatcaaagactctactcaggagaaccaatgtaagcatcgacgacagggatttcagcccctgtcatacctcttccggctcttcctattaaaattccggttctaatgcgaatctcatcatgatagagtctgtttggtgcgatgtttcccttgtagtcctgtcaggggagtttagtaccacatacctattagtgggttcttccagcttagaccgaaggtcaatctcatttattgatcttggcccacgctggactttggtgttggttggagctagagaaggggaaagagtttcgtcgggagttttgtgagaaaatttggcccggtggagctttcttagtcattctggtcacgtgttgcttttgtatggggctctactctacctctatgtactagtggatacggaatctgtataaagatttggataatgttcaatattaaatcattattcatttatataccggcatttatttcataacggtcatgattccatgtacaacacatgtggtggtgaaaaatctcgaggtatgatcaagaggacggcttcatagtcccacagcaagaacatgtccaccattgggtctccataaagctactgcacgagatgcaaacccatccaagaggcttcttatctgcaccccggtccaaagatttgagggtatccagtgcacgggttcggttcttgaaaacaaatgtatccccgggattcgctttcgcctcttcctttcgaccaagagataaacgccttttcttcaagtttcgtgactctgaacgcactggctgggtagaatggcgaccagaggcggacgtggatggcgtgttggtcggaggtggtcgttctgctgcacaggcgtcacaacataagaaggtggacgggttctccagcgtgcatgttgggcagatccagggtgtctcgtatgagctgttatcggctgtgagatcaacagcttcattgcgatctgatgatggggcttcttttggaattacaggcaaatcttcggagacagcaggtggaatgtcggaagaagcaggtggcggtgatgattttgtccgaggtcctgccgggtgttcttgacttggcgtaacatatgacgactcatatttctccctttcttcttcctgtatcagttcaatgaaggcctccatgatggcccgctcgtttgcgtcatcttcctcagcctgggttctgaacccatgcgaggcctcttccgcaagttcagtgcttcggtctgtaccagaagcacagccctgggtcacttcaatacgccgctgggcagcgtcagcccggagttttcgcatatctgttcctcggagcacgcgcgtgccgcctagcttcttgccagaatttttggcaagaatccttcgctgttcagcagcggcacgagcttgacgtcgagcttcatccagcggaattctttgaccacccagacgctttccttgagataaaaagccctctccagtgtagccttttcgggctagttcctcatgctcatcgcgaagttgattccacagcgcatgaaactgctggttgtgaggaccgaccacgttgtggcagagtctaagattgattagattttgtatttttaggagatttagatttcaaatcactcactcatgaagcatggtatccaaaatctgttcaaaggggagaaattgccgttggtccgagggataccgcaatcttagacaaatcttctggcccgcgttgacgttcagacccagcaggtttcgctgccgcggataaaattcacagagcgtggccactctccaggcgcgctgtcgcatgatcggtttgaccaacgatgcgactttgcgcaggatcaagagagcttcggcttctcgggggaggttcttttcatggcggtattctgatattagagggtctagctcccgcattttcgagatttttgatcaagaccttgcacaatatggtaaacagtacactgctggtaggttactgtcttcgttgggatggcctcctccgaggccaggatctgggcaagaagatttcatcagagcatgacctatatggcggtgtaggcagctaggaacagtcagaagaacatagccagtgatggaaattccagaatgaaaccaagtttggaacatccatggatgccctgcataacgtctggattcaccccccgggatattacgggggggagttnnnnnnnnnnnnnnnnnnnnnnnnnnnnnnnnnnnnnnnnnnnnnnnnnnnnnnnnnnnnnnnnnnnnnnnnnnnnnnnnnnnnnnnnnnnnnnnnnnnnnnnnnnnnnnnnnnnnnnnnnnnnnnnnnntgagatagcggggggtgaatttgatcacgtgacatggatatacatcagatggtgttttctcagtcatatactagtagtagacacaatcctgaatttaggaagtgcactatatctaggtaaaatttgagctggaggatacttggaatgtcattcctatcatttttgtagtctcttgtttgcagttggggccatctcgtatacagatatatattcacagtatgtcaaattgatacgatagctaagttctaaaaacccaacattccgatacatttcactatttccaagcaagaaaaaaataaaaatcagggagaaaaagtcataagaccttgagtagtcctgtatacttccggcggcttccccccctccaccgttttttannnnnnnnnnnnnnnnnnnnnnnnnnnnnnnnnnnnnnnnnnnnnnnnnnnnnnnnnnnnnnnnnnnnnnnnnnnnnnnnnnnnnnnnnnnnnnnnnnnnnnnnnnnnnnnnnnnnnnnnnnnnnnnnnnnnnnnnnnnnnnnnnnnnnnnnnnnnnnnnnnnnnnnnnnnnnnnnnnnnnnnnnnnnnnnnnnnnnnnnnnnnnnnnnnnnnnnnnnnnnnnnnnnnnnnnnnnnnnnnnnnnnnnnnnnnnnnnnnnnnnnnnnnnnnnnnnnnnnnnnnnnnnnnnnnnnnnnnnnnnnnnntcccgccgtcgactgttttatacaacccgctgctcatgtgacctttccgataacaccgcgagtgttatcagcatccatcttatcgaactttcgctcttctttttcattccaacttgttctcagataaacaagatgacgagcgacaacaagttcttttttgactacgtgagtatcatagaagaagacaaagaatgcttccggcgctgatacttccttacccagctctcgtctatctccaatgacgtaaggcggtattctctcgacgtcgcagactcgatcgaccgccaagtcgactatgccgcgcacgcgatcaaagatacggtggcccagcagtcatggataccagccactattcgtccgggtcgtgctcccccaagagtgcgatcgcaaggcatgacggaccgagtggaaagctggatgactcggaatcgcgcatggacggcggctatcctcgcatttatcgggaccggcgttgtcttatactatggaaacaaaaagttgcacggaaaacggagaaaggctaggagggcggccagcggcgcgaggaaagagattgttggtatgtgttgcctacattcgatctgcattaggatccgagtgctaattctgcgattatagtggttgccggatcgccgcacgaaccgatgacaagggctattgccatggatttggaacgtcgaggatatattgtatatgtgactgtgtcttccgcggatgaagagcatatcgtcaagtctgagaaccgtgtggacatcaaggctctctggttggaccttacaactgtaagtgctgtttgtgtatccttcattcgcgataaataaactaacattgtaactagacatcatcctcgccggccgaaatccatccttcgttgcaagagattcgctccttgatcagtcagccacagtcacccatcgccggagtgcccccgcacacctgccaactgagtggccttatcgtggtcccatcgaccaactatagtgcaggccctgtcgcaaccatcccgccgtcatcgtgggctgacacggtcaacacccgtctgctctcgcctattctcacagtgcaggcattcctccccttgctgaccctccgcagcaatagcagcactattgtctttgcctacccctccatatcatcctcgctttccgcgccgtttgccggacctgaagtcgccacaacccgagcaatctcaggcttcgcggcctcgcttcgtcaggaactccgtctcctcgaacaaggcaatgtggatgtcgtcgagctgcagctgggcaatattgacctaggacctacataccgacatggccagagtcagatagcaggcacagaagtccttgcgtggaatacccagcagcgagccctctatgcctcacagtatctgtccagcgttgagcaacgcccagttgcctctgctggtcccagcaccatacgcggatcaccggcgcggaaactccatcacgctattttggatgctttggagcccacctcgcgggatatcttcggccgtaaagtgaccaagaaatctgtcatgtatgtgggccggggagctcggtcatacggcctgattggggcctgggttcccagtggactcgtggcgctgatgatggggtaccgcagtgggaatgggattaaccccgagagcccgagtggcagcggcagtgaaaccagctgggagagagtctagacccgtgtacacatctcgcttcattggcactcccatctttaatatatcaaaagcacttgctttgaataatgcttttctatacataatatcatcggaaatactcttcgctcttaatgattctattatccctaccacatatcgacatatagcattaaacgccatagaaatttattagattagttgctacctagttggatatcattcatatgatgcagcgccatcctcactcctatcagaagaagaaaatcgacctgtcaaatccctctaaaccggcacaaccttcctctcattggacaactcaccaaaacacgcatcgctaaaagcctcgtgtgcgcacagcgggtcccgtgtcgcccgcttaatcccaccgcgcgtcaaacgacgacgcaaatgaatcagcgcccaggaaatgacgaagaaaaccaggaccgcagccaagacgccgaaacagtatcccgtcacaagattgctcttctgcccgtggtcaccgacgtcgaggaaggagtatgggtaccagccttcggtttcgtgcgtgatgtatgcgacgcagaggtagagcaggagtatgaggagtaggaacgggatcgcgatgaagggatgcggcgctgtggctgggaggatgatttccagtagggcgtagacggagttgaggacgtgttgggagatctggagatgtgggttagctaatgtgccttgtattcgattctttttttgctttgtctccacatctgcggagtagaagagtgttgcggggttggggtggggttggattgtgatatgagctctgttcatgtggcgggggatatgttggaatggaagtatagaggcaaaatcgaaagatatacgtacattttgccagcgggtgaatggctccttgtaccacggcgggctgaagaggatagcccaaaagacaaccgtaacgagaatcgggaaggttgtgactgtcacatacaatagactgtgtagcacgcggaagacccgcggccagcggtcgaggagaaccgaatgacccgttcgtacatagtaggctgtatggatggcggcgaatagcatgtagaagccagtgccccagtaagtcagccaagtgaagtagctgaaggagtgaccaatcgaggcggggtcatcgtgggtgccataccagccccagaagatgaagatggaggcgaaaatgtacagcgagatcagaccgcgaagaccagcgaggacggcggggggtaagatccaagatgtctcgaagtggtgtttgacatcggtagtccggtcaactccgaagagagttgccaatgagcgtcgaggcatgttgttgcgcgtcttgcgatttcgttgtgccctgggaggattgaggctaaagaagtaaacaaggaaaagcaagattcagctgtacatgtaggtaggcactgttgagattggaactggggtaattaatgcttgctttttcccgcgatacagggcgacctcgcaagccgttttgcgctttaaggcgtccgttcacgaggactagagccagtcgtgcaggtactatgctcccggtctcacctctgtccccacaagcgctggccatacatagcgaaatgaccttgaaggcttgtgattgaatccaacattgaatcagaatcaggggtgagtcttataatggatgaagacatccgagactttgtctctcggaaatatagcattaggttagatacagcagtactttatgctatactactgcttatagtctcatgctaggtacagactgaagtatagtaaaacaaagtctacgtctagtcaggtctacaggccaaatatatgcgaaacaaattggtatattcacgcagtaagatcctaagtcgtgaaaataatatttctttcactcacactaggatcaagcgggtgccgcacaatggatctgaagtctagctctagcggagcattctgaacagttcctgaggtaataacgccatcaaatggcttcagcgacatttgaatgcagagggaagcggctgcgtgtctatccagccaatctgctctgaatcagatggccagacatcagaaaaaacctcgaagaacatgtctcgacgacttcttggaacttgttcaccagccgcgatctgggtcataatgaagaccctctagttgtctcccttgaacatccgtctcctgcaagataaacacaaactctctagaagttgaattacccgcttggcatcgataatttgtggattccaggaaagtcgtcctgaatgagagcttcgattgtctcagatctgaaatagaacatccgctcttagggcggctatctcatgatatttgagattgagttgaccgaaagatgtgaggcccgcgcgtgaacctaacctagcctgaagctaaaggtttagtatcttataagaaaatgatgtgtgacgtgacatagtctgaggtatagttggcggctatctcatgatatttgagattgatgtgaccgaaagataggaggatcgcgcgtgaatcagccaccagcctgaagctaaagggttagtatcttataaggagataactagtgtgtgatatgacatactctgagacatagttagcggctatctcataatatttgagattgagccaaccaagatatgggaggcccgcgcgtgaatccaacccagcctgaagctaaatgtttagtatcttgtaaggagatagtgtatgatgtacatactctgaagttggggacctccggtagaagttaatccatttgttcgttacttgaattcatcaaatcttttgtgtgatggtgtgtgcgacgatgtaagcgattggaaacatccagggagagagagtccaaataaatacatctatagttgttcagtttgtcgtttgcttacaatatcttactagctctgtattgggtggtatgtgtatctaatcatcacgggtttcaatacggtaggtgcttccaggcttctatagagctgatcttatgcagtcttgcttaaggttgttatcagctctattctgtgcaatagacggtatcactaggcaataattatacagttatgtatttttcaaaatgatgtctcatattatttacttacctgtaatatccataattaactggcgcagtggttaatgagccaaagtctgatagagatcctatacgctttatcgactattcggagacaaagtagaaaaacaaataagccaagtaaatctatagcaaaattatttaagaactagaagaagagaagcaaggagggcctatttgtcacttctcccatgcctcggccatgatccatcaaggttggcacttcgtatacaaggtttaggccacccgtggacccgggggtgttgctgagtaacctgcaacattatgcctaattggggatagtgcaaaccacggaccatggttgagttaactcgcagaggccgcgtatataatttctatggcgacatctgaggttgtaatatagcaattgcactatcaaaatagaaaagaagccattatacaacggccggaggaggaatcccttgaggttatatatccccatcccattcggaaccatttgaaacccttttagtagtgtggtacccgctctcgtggcttgcaatctaagtaggggatggtctcacttctctcaaccattggtaaagctcgcccgtcttgatttttatatatgactaggcaccagtttcttccatgtcataatcgagagcaggcatcactcatgtgaggtggtttcttcagatcagcatatgatgaaaccacccgtgtggggagagacggcagagcaactaggattctagaagatagcgggtcaacaaagcactcagtcctagggagtaggagaataattagggaaatcaatagtaggcttccaagagtatatgctctaatagaagaatccatagccaataacaatacataatatgcgtctgaatgttattcttggcgaccctcccccctgaataagtgtcccccctgagacgatcccttgtcaaacgtcgagacacagtggagtgcgactgttttattttagtgcacggggcgcgtctatttactacttgtcatcctaccctcccaaggtttggcaattgtgatcgtccgcccttcatttttctcctttctcctttctcccctctctatacctctcccccaatgccctgatctttcatttggcttcgattctgtctgtagggctgtcattcctttggctctattctatcgcctcccccgcccgaaccccctttgtgtgttatccgcaaccccgacctttcttcagacactcttctagactacttcgatgcttccggcgcaaatctcgaatccaaccgaatcgggatacatgattcactagccgactattagatattcatatacccatcatggatatgcgaggaaaactgggcgaatatcgctccaactcccacgataataccctgcggagtggctccccacgggtggcgcattttgacggcgaagttcctcccgcactttcccccctcgacgcattcgccgctcagagtcgatttctcgcccgacaactcgatgagtctcgacggggagaccgccgtatgagtcggctgccaccggcgagtgtagctcgatcgctttcgcaaggccggccgggcttctaccgctccaagtcgtcggttgatccccgcacccgcaccgaactgacccggaaacctacgcagaagggactcccagagtatgaagagcccaagcaccgccctatatccgaacatcctcgattcagctccatctccaatgctaccaccgaggctagcttttacgaggataatgataatgtgacgccgcggacagcgacgcctaatattagtggggaagcgcatgaaataccgcgcaccgagtcaccagaggatttcacgtcacgtccgagtggagcggagggtgcgcccgttgttgtggcggttgcggatccgcaaggttcatcgatcgactcatcaacttcgcgactgcacatcccacgtaccttggcaccaccagtgtcaccgcggacgcgtccatccagcagtgccaaggttacacaccatgagagttctgatgatgaatatagcagctccaatggtgggtcgacgttctccaaacctcgcaagctgtccgatggaagtgctgtgtcattgccgtattctcccatgtcgacattccctgcacgaccacaccctcgatcgccgtccttgagctcggaaacatcaggaacgggaacgaaccacctaccccgcccttcttttaatttctctcgaccgctgagtcgatcaagtacgaccttgtctgctcctggatcttcgacgcctactgaaccgatccttgcctcggaatcgaaccatatgacccgtcgcggcaagccgactccgcttctcttgcagctctcgaccgaagatgctgctgcagtggaagccatggacggcgagccgtcgtccgccatgtcgtcttatatgtacaccaagtatgcgcttccgcgcggacgcttcctttcacgggattccgtggtctttgcaggcttgcaaacacctcatttcgagtgggaagagcccatatttgagaaaacgcctccccggcattcggaggagccaatacgtttggcacggacgccatcccctacgccccctcgccaattagagcactcgcccaagcctcactcgatgcacgaagtcccagcttccaagcctcaatctccacctcaatccccgcctcaccctcagcgccagccccaacctcaacttcaacctcagactctcaagtctcggcctgttcccgactcaccagtggagccggtattacggccctctgctgagagcacccgaccaacgaacaatgacagggatgaaactgtctcttctgcggattcggctagcacagtgcgaccccaagcccccaccgcccaggtctcggcttccggccttacagccgacgagcacgtggccaagggtattgaatgccacgagcgaggatctctgagtgagtcgacgtatcatctgcggattgccgcgaagcaggaccatccgacgggaatgctgctttatgcgctagcctgtcgacacggctggggcatgcgatccaatgagaaggagggggtacgatggttacgcaaagctgtggattctgtcggattggatatgttggccgatccggacgctcccggtgcatccaaggcgaaggaattgcaaaaggctaaccgggttcaatttgctctgagcatatatgaactaggcgtcagctacttgaatggttggggtatcaagcaggacaaggcttatgctctgcgctgcttcgagatcgctggtcaatggggtgacgttgatgctatggccgaagctggattctgctacgcggagggtgttggctgtaaaaaggatatgaagaaggcggcacgcttttaccgccaggctgagtccaagggtatgagcatggttggaaacagctggtacgttcttcctgatatttacatcccgatcgacgtcattaacaagtataaaggatctacaaggacaaatacaacgaggagtccaatggacgcgcccccagtggacgctcccgtggccgaaatgccagcggagagaaggacaataagccacgcagcaagtcccgcactcgcagtatcttccaacgcaagaagtccaacatatcagaggcatagactgtcttttgttctattcacattccttttatctcgacgcgttctggagttatcgaagtaccatccattttgcattttgcattatgtttggagcgttctgagctgatctttgatttttttgctttttatagtcgattcttcgacttacattccttcactttctcatgttcaaacttttccttttcttttcacatttgcattttcatcctttcttagccgcctgggcagctgttatcgagcatggaccgagtctggtccacatgtctcgcaggcttaatacttcacttctccgtgtataccctttttcgtttcctcccatcatttgccatttttgtctctctattttcatggcaccttctcttaccaattctcttcttggtcatatttcttgggtatgaccccctggacaattttgtttgtcatatttgttctcttattttgctgaatgcctcagtgtggcgactcatgaactcatgacagaatcaagacagcgttgatctgtatcttttggacttcctaggagcatttacttgatcttctccaatttttcagtatataaagcaagtaacagggtctcagcacctgaccccccgcattgttccccggcttttgtctcggagcattgactcaaaagtgtctagatcggcctcttctccgggctttgacaccctaaaacacactggcgtccttggggttatgtttagcgcggattattgtggattagcgggggttctgactggactagatcggcttttctctccgtctaaacctgtgaatacggggggcacactccttgcatccagggtcgcctcccttggcagcacgctatgttgctgctagtgtcgccgtccaccaatgagggtcttgctcattcaataatctagtgtaacggtactctagatgagtatttctgaaaagtcttaatctcccacgacacttaggaaacgccccggtaggacagagcacgcgtcctggaattgctcttggtattttagtccacctcggctcttgtctttcatgtggtgatgattagacactcgtaacctgatcctaaacatcttgatcgcgtcttcccggaaatctggagttccccgctaaagtgccacctgaacttctcttctcctctccatatacaattggagaaattacaaaacagggcaaaataaaagaaaaccagaagaagactctatcttactgacatgcatcatatttcccctttctttttcgaattgcatttggtggctttttccaggtctataacatgtgacgctagaatataccctgttagttcttcattttaggtctcagtcttttattataaagtacggaatactacccacgctctttcaggggtgcttgtatcactctcattggttttcattcttttttccccctcgcttcgaagctcttctctctttttataggtgtttgttcgactcgactcggtttgtacatgtcttgcgtagactcttacagttacaatccctaatacaaaaatcacagtaacaagatgtcgactacaaagccctcgttcgtcgagcaggaagccagcgtaaccccgacgccaacgaagaagagcttcggcgcgcgcctcgtcgcccatttcaagaaatggtggtgggtgcacctgattatattcatcgcttgtttcctgattatcctactaccggtgtaagtccactcttcctgacattcttaaccggcatgacggcccggacaagaaacatcccactcacatactactgcaccgtctagcgtctacgtcgcctaccccaagatcgcacaagacgccgtcaacgactcgaccctcgccatcacagagatgatcctcagcgacccaacacccgactccttctacctggagcagagacaagtcctcggctcgaaaagctcctaccatccccagatctacgctttcaattcgtcggtctcgctggccggtgcggcggctccgtttgcttatgttactgtccccgctgtgcagtcgaaggacggagcggaaatccacttcgagcagagggttgatctgacggataccgatgcgttcgcggattatactactgccgttatgttgaatgaggaggtttcgttgaatatctatggaaggccggggttgaagcagggtggtttgcctaagacgacggttgattataacaagactgttgttatgaagggtatgttattgttcctggtttcgtgaatctaggagaagaagagaagagtatggttactaactcgatgaaacaggtttgaacaaactcaagggcttcaatgtggccgagttcttcatcatgttcccaccagtgaacggatacgggatgaacggcaccgtgatcatccccaatgcctcggtcatgaccattccaatggtaattactcctctttccatgcatcacattctacgacactaacccaaagtagggcaacgtaaccctagacctccagctagacggaaaatcagtgggaacaacctacctaaacaacctcgtcctcaaaccaggcaacaacagcgtgccgatgctcggcaaggtcgatcaaggcgccatcatcaccctgctcacatcaaagtcgaatccctacaaagacggcatcctgcccttcgacatcaccggaaatgagacatcgtataacggcaaggacctgccgtacttcaccaaggcgctggctgcgaatactctgtcgattaagttggatgttctgagtgcgctgaaggcggcgggcattaatcttacgctgtgatgtatactatttctgttaatgctcatggtttatgtcctacgttctactttctatattgcactaccgtgaccgttaacagattcggtggttggtctgtgctgtttggaggtttgttcacgtttgtgtatatttaataccctttttttgttatcagtatctgggttgttacttaataagatgtccagagtgagggatatagtgcttgaaattttttggatcacccgacgactcatcaaggattagccgacgtaaattgactgactgttctttcagtaacgaaatatcccgctctagcttgttcagtataaaaagacccatcgtatttccaattctcgacttcgagtaatcaagggtgtctctgtgaaacagaatgaagtaatctagtagccaacaaaagaataagaatgaccaggaagaaaagaaacggaagccgcatgactctccagtcaccctggtctcctatcagttgacatgtgcggttgtctgattagtcggaaatagaacatatcctacaaaccagcctgcagaaactgctagatatctgtcccccatcccctcgagggattttgggacactgcacgtgatagagtttgcatgaaggctccgtttgggtaatgggaagctgagattttctgcaaccccggaaatgggataattataaccacttctgtggttcagcggtcatcaagagagggacggcgttgcccatactgcgggctattatcctgtgtacaatcccgaaaggaattgtggaggtaaacctactatttgaaatgcaatagacaagaaaaatagtgctcagcttgcccaattcaatggaattcctagcaagacagccaactagaatagccatgaaaacttgaatgttaaagttgcagaaagtccaatcctctgatagatctcagaaactagactttccaaatcttgaataaatcaggtgcacatatttattatgcttggctttcttgctaagtttccttttgcacgagctggtcactattatccttgtgttttgcttttcgaatggtagttttacctccaacctccctttcgggccagggctgtatcaggtatagcccgagggtatggtatagtgaagtgttgttcaaggtgggaggtcgacgactgttttcttttagaatcctgtattgtgctgtcggtcctctatcagttagcatccatctgtccaccggtgtagtttaattgatatagcttgccaaggtggtggcagtagtagatgattgtcatccttgaattccagcagggacagctcgctgtggcttcaagtggaagttgggaagccaggtttggaagtggaagttatcatggccaatgcaagagtgggaaagacaatgtgagagatgaagaagtaaaatccagagagatggtatttatatggcaagggcaggaaaccaggcaaccatgggattgtcttacatggggtttttcttccacgtgagcaacctgaaacagaggtaagtcaggggatatgtagttgtccgtggaaatataggtatttcatggcagcctgcatattcaagactgtctctcatagttctacctgaagacggtaagccgcagtactcgaatctgtttctcgacactatatacgagtgatctcgccggcgcgactgttctaacttctaatgctgcacagagcccctcttactggcttattggcttcacagcgacccctcggccagatcaactcccctgcttttgtcagaattcagccccttaggagaaacttggccacgtgattttacctggtcacatgatgtttcattaaaacgctatttttttcaccgctaggggagaattggccacgtgacacgcacgtatgtacgaccttgtgatttatagttgcttcgcttcgctccgcaactatacgccctggatgcagtaccagcatgggttaacctttggagacaagccacaggaggcatattatagtattgcatgtcagagcttgatagtgtctaaaatcattatctcttcatgaggcgtttcgtaagagacagttgacctttcaacaaagaattaaagaatatacacagagagtgagagcttcagattgtattactgggcaagaactagatagcttcaccactttcctatcaaaatatgggtggtataatccctaaagggaaaggaaaaccacataatattgtaagatactcgtataatgcaccctgatccgagactagtccagggtcaccatcttgattaagacaacgggcagctgccgaattatgccgactgactggtgtacctacctggagtcctcaagattgggtggtcgttgatgataaaaccgatggacatgatcaggggtcccacagatgggataagccctcacattataatatgaccactctcaccaccagttgaagcatatgctagatacccctgtattatgctaactgtgcattacattcctagtattgtatcattcctgataatctattccaacgcccttcacccacgaaagattgagctaacaagaacctcaacaaatgccaccacaaatttctgtccgtgctcctgaacctattgagacccccaggtaccccggccatttccaacaagaatccatacttcttgacaacaggaatatcacgtcattatcttcaaattacggtcgcactacttttgggtatgggtacaatcagcgcgattttgtatacgaaccgatatgaatgttcaatgaaactcgtgaattgatttgaggtatgagatcgaatctagttaaattgatcacttcactggactgtttcagagagtgcacctgcaagctgccgtagaccaacactgacatcgccgggctgaatgcagcactccaagagggctagtttccatggctccaaattgatccgatctaaggctgatagcagatcggcttgtgttttgatttgcatcgagaaaaatgccggattaagaccccggtctttgtccaattgagatgcgaacgggtcgttgcatgttcttgtatgcttgggtgtacacatggcggaagcgaatttggcatagttccaattggcgatgtaattatacggtccatcatgaattgcagactagaatatggcaaggaggatggaaaaatattagcaaaggagtcttgcttaattcaaagatggagaggaaaaaagagggaccttgaagcaggatatgtggccttagaatgaacagtaagaacttacctcgatctgataacccagattgttgaagatgaagactatcatgttggctctacttcggatggcagtacttagctcttgagcagtcatactaactactatcattgaaaggtgactcaaatctgaccctgcttgatcagcttttgaaaaacccaagcctacaccttattgggtgctgtaatgagttgaatgctggctacgctgcagataggtacgcgcgaagttcccctaccaaagttgcggttgtgatagtcaccttcacggttgggagcctatcactgcttaatgcaattgcaggagcctattctgagcgacttaagatcataattatctcaggctgtccaagctcaaaattgctgacagaggggagtctcctccatcatacgacaggtagagcgagcaaggaccaagcactgcgtgtattccaagagttcacggctacctcaatccgtctggattccagtgaatatgctgcactccgcctagatgaagctctctctcagtgcattcataaatcactgccagtctacattgagattcccaccgatatagtgggggttgtgggcaatgcagcaactcctttgcagatttcaccgccaacattaattcaatcagaggccgtcgatgaaattatatccccactgattgccacctggaatgcagcgcaccggccgattttgatcattggtgctctggcacgcttcttcctctcgacagaagctctgatagcatttgctgaaaagctgggttgcgccgtcttctgccagccggatgccaaatcaacgctaccagagtcacaccctcagtttgtgggcacattttgggccattgcttccaagcccgaatgtagagatattgtgatggacgctgacctctgggtggtagttggaggccgttggtctgatttgcacacggtgggaggtctcaatatcaaagaggagcgccgacgtatgattaatatccaggaaacatctatacgaatgccgtatggtcgattgtttcaagatttatgcctagccaatgttcttggcgcttttctgcggtcctcaattctccccaaaagagaaacacttctttcatcccaatggaagtcgcgtgaacagaccagagtcaacagtcctgtacttggcgaagctctcacagtgcgtgggatcgtggatgttatccaacagctaattacaagcaaagacaccttgatagctgatacgggggatgcttggttcaatgccgccgatatttcgctccccatgggggcgaactttcaaattcagctagtttatgcgtctctgggatggagcctacctgctgcgcttggctgccaactagctcgccccgatgggcgaacaatcctcatgattggtgatggcgcttttcaaatggaatcttggcgcaagtacctgggacggcaaagaagtccttaactcccagctcttccattctatgggccaagagggtgccgatattatggtctttgggtgaaaagctcggggtgatcaatggtggcatcaagctcggtcggtcaaatagctcagtcatacccgcactttcaggcatcctcaaaactattcgacctttgatacttgctgaagagaagtttacgttccatggtcagcctggagcgcgtaaagaatttagtcaattaagatgagagtaaggcctcacttacctttctccatcatatcatagacttggggtaattgctcaagttccatgatctggcattgcatggcgaggtttttacgaaggaagaattccagtgcctcctcggtatcctctctggtgccaacataagatcccttgatagtgatcatgcggatgacgaccgagaagaggtcggcttttatgactgcccctggcggcaagccaactaacacaattgttccccgagatctgatgtactgcaaaattcagtttagctaaatcacttttccggacgacttattgcgtggatgctgttaggaaaaagaggggagttaatgtatcatctcacctcaacagcctgggagatgggacgatcatctgatgataccactaccacagcatgaggccctccgttggtaagcctctgaatatcacgggtgagatccttggagcttttatagtccgcaaaatagtccacgcccaatttctcacaatgcgttctcttctcagctccacttgatattgcaagtactcgaaaacccatcgccttcgcatattgacaagctagggtcccgagccccccaccagcaccagcaatggctaatatagcccatcagcagtgaacgtggatagttataacgaataaaatcacgacgaaatatacgaaatcataccaactatatcacccgcctgggcgccggtctcttgaagagcgcgatagacagttaccccagcgcaaagaatctatattcaggcgattagaaacacgccatatttgtttgagctggataatgaggtaaaagaaactagaccacttacgggagcaatcttgtctaaaggcgcttctggaggaattcgaacggcacagagttccttacagacgacgtattgctgaaaggtgccgtctctggtgtacccagaaaactgagcacttgcacacgacctctgatcattggaatcacaggatacacaagaaccacagatactgttgatccactttatgtcaagtgggctcatttagtatacttgaaagagtggaaaaataagcaacagggacaagcattcttctctcacctgtattccaacgtggtcacccacagctaaatcttcaactccctctcctgtcttaacaacaatccccacgccctcatgacctcctttagaatgtcagtatggcccttttgacacttaaaaactggataacgctgatcaagggcattgagagatcaggtgcttaccgataagacctttcttcggatcaagtggccagccccctttccacgcttgcaaatccgagtgacacactcccgagtatttgatattgacgagcacctcggtagcgccgggcacgggaacaggtacttgggtaaagtgcaatgctataaatattaaacaacgaacgtaagttggaagaatggggctttgaaaaggagtaaatttattacctgaaccactggtctcaaagacctgagcccattgcctctttggaatgtcagtcattcttcctgctttcaactcgaattatactgtatctgtcgaacggctagagaaacgaatattgagaatcgcaccaatttttgagtggaactgatggtataaggaaatggaatgttgtcattaaaataaaattggcttgagaagggccttcttataagttgagcaataagtatgaccatgaatcctgggatgcaaggtcgtgctatcactattggatcgaattgagtactccggtcttaccacccctcgtcctaccctcctccttgattattctgcattatataccaagactggaagtgattgtcttgatcgacaccgtttcagttcctttatttgtaatacaacttactcatttgcggcatttatgattcaactgtatacatgtgcaagatagaagtcttcaaaaacacctcattgaatgattcgttatcatcaagctagatgctatctctgagatcccaaagatgcacctgggcatcttacaatagaatttccgcagtaccaagtcagccaaaaggatcatactctacccttaatggtcttcttgaaaccgtttgatgttacaaagtaatatattagttggccgttctgctatctctatgggtttgcacatcttacctctctatcacaccaacgtgcgtgcctactttcggtaccacacgaatgcacatgtctagttccgagtttctggaggctgaccatctcctgcaatcgtccaacaacagcatagacaagagaattgaaccacacaatgatatcatttacacatctcaccttgccaccaaactaacgtgcgtgcctactttcggtaccacacgaatgcacgtgtcgagtctcgagtttctggaggcggaccatctcctgcataatgatatcaggtggtgtaatggctttcgtcgcacagatcattatcacggcttcacgttttgtctgccgatcaaatcaagatgcaagtcaatcatcaatcgtggatagctattagatgagtcatgtctattgaaagtaactccatattcacaagcgtaacatacaccaatgaggcttgaccgtacaccattataaaagtagcctagaatattccctcatatgtttggaaagtgaaccccatcatcccccctcgccgtatagactttacgttttgcatccagacttgaaggcggtatcagcacctttgcccagaatgtttcctcggtcactcaagcttctacgtgatgagagctccgtcaagtacaaacacgtacattgtacaactattacaaagaagactttgcatgaatcactcaaatcgccagttcaatcctcggggcttcatactgggatctcaaaaaccgtacacatagccaacttaccatcgaaaacgaccaaggttcttgaaatgaaacatcgagtggtgccagttcgtctttcggggtcttcgatatctaccaagtcaggtggacaactgaagtataccctcgatcgatctctgatgagtatgactggtggccagattgtgtgtgagatgcttcgaaggcaagaagttgattctatctgtaagttgatcctacgcaagggagaaggaatttgcttcctattttctatgcacatctcgatgatataggagctgactatatgaacaatgagcagttgggtatcccggcggggctattctgccagtctttgatgctctgcacagctgtcctcattttcgatttattcttccgcgacacgagcaaggggcaggccatatggcgcaaggatatgcccgcacatccaggaagccaggagttgttctgaccacttcggggccgggtgcgacgaacctcatcacgcctttacaagacgcgctaaaagatggcactccactggttgttctcaccggcgaagtcccaacctatgccatgggcacggatgcctttcaagaagcagatgtgattggcattacgggcccttgcacgaaatggaatacggtggtacgagacattcgggatcttgccacccagatcaatgatgcttttagaattgccatgagtggacgaccgggccctgttctagtggcactacccaaagacgtgaccagtgcggttcttgaaacccccgctagagtggcttcatcccaatgtctccctaaattgaataaccccgttttacgatttgatgctctcaaagccaaccgatcggcgagcatcaaaagaagcgcagatcttatcaacaaagccgagagacctgttctttacgcaggtaatggagtgctttcgtgtgccgagggcccgaaagtgttggcacaattagctgaaactgcctgcattccagttgccactagtcttcttggtattggatgttttgatgagaacgatccaaagtcacttcagatgctaggaatgcatggtactgcatatgcaaataaggcgatccaagcagctgatttggtgatcgctttgggcgcacgctttgatgatcgtgccatcggcgaccccgatcgttttgctcctgttgcaagagcggccggtaaagaccaacgaggcggcatcatacacttcgaaatccacccccctcatatcaacaaaatcattcaatgcaatgaattcgtccaaggagatgttaccgccggtctcactgagttacttcatcatgtccagaaggtggagagcagaccggagtggatgggccagatttctaaatggaagaagacattcccgatcaagccgacgcctccgaagcaaatgacacaaatatctcctgagtgtgttattaggcttctaagcgatcttactgaaaaattgagcaaacaaaccataattaccactggtgttgggtcccatcagatgtgggcggctcagtttttccgatggactgcgaatcgctcgctgatcacttctggaggtgcaggaaccatgggcttcgggcttcctgcagccattggcgcccaagtcgcacggcctgacgcaatggtcattgatattgatggggatgcatcgctgagcatgtcgatgcaggagatggccgtggccgcggagtttgggattaacatcaaaatcttggtactcaacaataatgagcaagctatggtcacacagtggcaggctcttgattatgacaagcgatactcccacgcacatcaacgaaatccagactttgtgaaggtggctgatggaatgggcatcaaagctcagcgattggatgctgtgtctgacatcacagataaacttgagtggcttattcgctcggaggggccagccttgctggaggtgaaggtggaggaaaaggtccccgtgcttccatgggttactcccggcaaggcattggatgagatgatcatcaatgccagccagattgacactagtaggaaataggttgaagatcattttgcgatagttcttgctgcgcgatttcttttcaaagcaatgaatagcataattttatttgatgtcgtatatcggagacatttaggctgatctttgccttattcatcggactatgtaaagcagatttgctgcacagacgagccgagccgaacggcacgaagtaaaatactacgtcggagatttggccggaagggagctaagaccgagatagaatctagaatcatcgacggagcacactcggctcacatacgaagcctttgtatggggccggaattggcaatgaaatgcagctcagattagtctcgcgcatatgtaaaatacgttgcgcaacattttaatatgccgttggagtagaaacctgcatatttaaaggcaagtatggtgtggacgaattagtacgacatctactattccatatatccttgtctaaaacagccttcattggtccagtaccagaggccttgccgtcgcagggaggtaatattagctcgatataatggttggtctcccacaaaacttgcatcctcaaaatcattggtagctggtatgggggtatgtataaggatgtgaaatacttcagcagtcggacctcggaccacaaaagtctccgaccacacccacgttttttttttgcgaataattacattttggaaccgtattttttcctacgctgatcccctctgactcatagccaggtgagacctctggcaaggtttcaatggttggtaacggccagaccgtagcgtcgcttgggtccactcccaccaccaaggccagggcaaaccacaccctctcgctaagtggtgcagctgtcgtcccgtctgccgtttagtgtacaacggccacggcccagagacctcggagcgtctcacctatctccggggtcaggttttcggtcaggtccagctaggtcttttaagattgcttagtacttagctaaatccacatttcagtatactatcgactaagaacctctttgctcaagataagaactaaattcggatcggctgcccctctagtctatctgaaaatgattgtgctttggttattcaaataattcaaaacgatcccctcatcctctataaagaaattcgcgaataaagtggccctccgccccaattccgtattgttgatatgccctaccttgctttccggagtacagttcgtcagcgaacacgcgccagtagtcataacccaaattttcatcgaatggtttgaataggtttggcaattccattaagtcgacgcttttctgaggtacacagtaaaccaggtacgttgagattttgtcgacacaatcatgatcttattgattgattctgttgactaaaggctcatctcgagaaagctcagatgctagtcgtttgacgcgtatcatttttgtgttaatcgagatgtagccaccaaaaatcaaaaggtgccactctccagtgctgcgaagaaccctttgtagagaccaaggtctggaatcacattgaaacaagacgtgagaattgggcagtctggtaccaacagccaatttttccagctagctcaatcttgctataggggtagttcaatttgacgtacttccctttcagatgttctcatttcaacagtcactcgaacaggatactctcacccctcgcatatagtcaaatcgactggatgtgagttccactttcgatactgtccgcatgcccacgctgagttctgcatggcaattttatcaatgatcattgcctttattcccgtttgtgccatccatgtaccggccatgagcctaaggtggatagtcagtggggttttgtttcatgaacgacgaacatatcctgcaggaccagcgccgacaatgagaacatcggtgctcagtgagttatgtgtcatattgagattggacttgaaattcaccaagtcaggttgacttgggtactgcaatcgtgttccaagtaactaggggtttccaaggttccatgataggatgccgaagtggccatgtgatccatggatagttagttaactataaaagcactcccggggcataaatagcaacgcagacacctttccacgtttcgtctcagtagtcaccccatggtgttatcctgtctagcatcctactactcctagtgaaaactctgctctcacacccgtttcgcaggcagggctcccgtggcagggtcccctcttcaatatgttgtattattctacgtacagcagccgggttatagtagctacataggtcacgtaggcggtacgcccacctgagggtaacaggaatatggcagttatgatacaatgtaccgatttcttaaagctattagaaaaagttccgtctttagaaagggctatttttcgttcaatgtggaattaaaggctagatcaaaagcgatcaaagctgacacatcaagtgacacagcaagataaatttccttgccaacctataaattacaccaaaaccccttgtgagaggaaagggaggggggggcttagatcgaggctcagaagctgacggccgtatagctaatttggccgatttgccgctgaagaagtgggacccgcaatggccttctagatgttagcccttgacgtaccttatccgataatccatcctgaattgtggaaatatcttcgctaatctcgtcaataaaaaaatacagagccagagagaaacgccgagactggtacttcggcccgagccctagtgatgcgaccatacactgaatgacacgtgttagtttagttattcgacatatgcatgttaccctcgcgtgggtgcactatgggtgcacgtcactatagagtagctactttaccccgctgctgtccatagaataatccatatctatctttccctgagctaccagtgtgccaatgcacgtcacgagtcgcctacacaaaggccacacaatcgagaacacgtcgcgaacttccctgcacttgcatacatgaatcgcatcattgtttcttcccctcaccatgagacctatcttattggcttcgaggctaaagtacgcaaagcgaacgcctttgggtgatactcacgaatatataagccctgtcttctctgacacaaattggaggccgatcggtttttggaaccttccaggcaccctcaagccagtatctcaaagccatcttttattatgtcttcgatcgattcctcacctttggtcaatagtggcagcctaagaggttttgtcaaatatatgggtatactggcgtcaagctctgaagctcagtttgcatccgccgtgcttggcgagatcacccaacagcgtgagcggaaccattttcaagaagaagagctgaaaaaacttcgaaaggaaattctcgagatcaacgaaacaaaaagaaccacgatcgcggatatgtttattgccaacgagaacgaaaaggcaaaacagagagactccgcgacgcaaatcgagtctcttcgcgctactatcgacgcaaaggaaaagaatattgccgcgttttctaaggatctcggggcctctaagcagaaaatagcaaagttggaattgaatctctcgcaggagctcactaaaggcacaaaatctgccgacgaaatcaatgtactgcgagaaagtttgaaagagaaggataggacgatagaccaaatgaggactgctggatcgaaattgaaatcaatgctatcagcggaagagaaaaagaccaaagacctggaaggtgctaatacctcgatggatacagagctgcaggcagtgaaggctcatatccagaggctggaagagtttcctatccagccttcggctattcttgaggatttcgtgtaagtcgtgcgatgaatgacacaactatttgtattaaccgttcctgtatcattgacagagtcacgaaatttacaagcctgtggacttctgctaaaagcgggttattcccattgctagagcaggatgttccagaagatactttgaaggttcgtcctcggccatcttttctcacgctcgttactgataggatcaaaaggagaagtctatctgggagaaacttaggaaggcggacaggatactcctaccaccaagctttcctcttataccttcaaattctttggctgctaaagctgtacgatctgcgttgatcctggctgttctattcagagagatcgatcgacgtatattcaaaccgagctattttctctcagggagaaacagtcttcatgaggctctcagtcatctagcagagaataatggcgagaaagaagctttttgccgtcgcatacttctctctattgacccgcacgctgaatacgtggccctgaaagctgagattcaagccgtggtccagacaatgtcttcgtttgtggaaggcctattccctgaagcgcaacacgaattgtttcgtacaaaaaccaaatccatagttcaggacgcggccgaattttggcttccaattcagcgatcgcaacagaaattcgagatagatttcgaaccgtctgatctcgacgacaatgaatgggatcgctttcctctcgctggtgaaaatacaaaaccggtggcacaagacattcatggcttttatcttctcaatgtcttcccgtgtatctccttggtagaagacggcgaccatgatccattgaccaaggtcattcaactccgtgattcccaggaattatacttggcagcgcagaatgaagctactcaagtagcaacctctgctattaccaggaggccccgccccaggaggcaatcaactgcaggctcaaataggaggccttttttaggtgggaattcaaccaaaggctgactgataatctgtggagaagggtttggaaatgctgattgctctggagactgaaggagagtataatggagatgagatgaccatctgaggactatcaacaatagtactctatatgaacatttttgggtcatactcttcttatagtttatatttccctgtatgaaataatgtcttaagcctccagccatatctttgcataatgacctcgcacttgccaatcgaatcgttccttcctgaaccgtaagcgaggtcggggcttgcatggtttgtggcgagggagagcacaaaacccagtcgaggagatcgtagattgttttctttttcttttccttctctgtacttagaattcagaattgactatactcttttcttctggaaagaactggcatgtaacacctggaatgaagattcgatcgcaccagctggtgagatttccattagtctacgcagaagcgttcagggttcgaatcggcttttaggaagtattttgatgcataaactttttaattagcaccgctcgttataccatatatacaggaatgaatggtatttttattaaataaagctttcagcaccataaaaattcatgcatttcaatttgtggaggtggttggcaagctctctctttagccctgtatgaactatgggtactttatacttctgatgactagtatttaactataagtatcctgggcacttccctacttgcttctttccttccttcctacttccatcttttctcttccacccatcaccatcatcaccatcatctcctttcttccatcactttcattgtcgcttcacattatggcatcaggacttcctacacacgagctacttctcatctcgccaaaaacgagtccgatagattcctcgcctcgtaaacggaggacgaccccgtctcccgagtccatcctgcccaaaaacgttgtgttgttctctccccaaaattcccatctacagcccctggtagctccgcccgggtatgattttcaagtcattgttaagtgataccgactatttcagacatgcaaagctaatttcatatagatttcaaacctcccccatcctcttcaaccaatcttcaccggcatccctcactacatagtcatcccgatcctgcagcagaaccgtgtttaccttcctcgcgtgaaatcatttttcgtttcgacctgcgccaatcttcgtggatgttttccgaatctcatatcctcaagcttctgatagatctttttccaactacacaggcggttgagtttgatgacaggattctgatctttcgcgtcgaagtactgccaccgaagccctggccaaagcgaattgcaggtgttccgtgttatctgacggacaatccgaacgataagggcccagccattcccttccgctatcgaactcgttcgaatatccaaatctcacaggaccttgatcttcgaaataagaatgactcactgaacctcatatccgatctagtacgccagttctttgaacaagctcgaatcccaatcactgagattcaggtgtggggccatatcgtcgtcattgttctcgaagatcgaattgaccacgatgaaaatgctatggataaaattttgcggtctgttccccgttctgttgcccgttgcaccttcttgtacctttcagagcatcacatggatcgcccccgcacgctgcctgctcaacgacttcaaaccgcctctccatcgcgatctgacggctcccagtacgatatactgagaccaggggtgatggtcagctccggtataaatctcaaaggagagtcaatgcgttcgtcctccggtgtcctagtcaaaaataatctgggccagaaattcatgactgttgctgcgcacgggttccctgccgatgcaaccgtttaccatcctcatgccggtggcagaacaatcggcagacttattatggaactcacgcatacggacgttgccttagttaatctcgaagatggggtggagtttgtaaatgaaccattcgagaacaccctaacgccagcgacttcattccgactccgagatttcattcggattgcagagactcagcagcatgatctggtatacttcgatagtcctttctccggtcttgctgaaggcgagcgaatgtctagaaacaccatgcgggttccatccgacgacccccaagagccccagcagatatggtttacgacacaatggagctatatgggacaagattcggctgctgatatggttgacggtgtttgtggttctgcaatttggaacgatgaccatagagttctcggctttttccgttatgccccggttgaaggtttatacaaagattattgcctgagtgttgctgcagatcatctgatcgacggaggatacagtgtggtctagccccgtcctttctttcagttatttgctttctctattcgaaaagtgatcgatggagcctgggatattcttactgtttgctgcggaatttgcttagtggaggcttgcatttttttaattttccagttcataatttgcccttagggaaggaatacaacttacccgcagagatctacccttgctcggtaccccgttgagaacggaagggtttggaactcatcactttgtctctcacttatctcctacttatcaatcacctcatcttcactgttgtgatcctgctcctctaaattggtgaccgaaaccccaacgaagctcgaagaagtttataacactatattctttgcgaggtggtggtcacctgaccactctgacaggtggcggaaggcaccaagcccctcggactagatcgtggtcgtttcgcctagtagaaatacaactctctccctctttcttccgcgccacacatagtagcccctcaacatatatcaataagccttgatacccttccctaaatgtcggtgcccttgctgtccccgttgcaggtcccctgttcactagaaaaaaaacgatctttctgccgcgattctactcaccttacataactatttcctaatacgaagaaaatcgtatttcaaagccctaaagccgtggccggtaactattgccagactctaaccatatttcataacgggcccgaatgataagggtctcatgactagcttacagccgctgtcgcttcctcgtagatcgatcttccaagaaagtccactcctcagacggcaacatgtgcttcgcctggcggcttatatttcggtccagcaagcacgacaatctgtctccttccaataccccatatatttcaatacgcacagtcttgcaaattccatcatctatcttagcataaaaaagtaggaaattttgagctgtggggtaacactctaacatccctctgtattcaatgaggattgcgatacggggcggcgtcgtaggtattatgtcttggttggtagtatctatcaatctgttcacttagctacaaacattgacagtgacttagggtagaaatatacccttatagagaaagaaaggccatgatgtctaggtatattcgtctggcggttcctccgggagaaagatatcaagttatagaaccacaaggtgaaggataagagtactgtttactccgtactgccctattaacgcattgtctccaactcattgtccctcaccaactcgttatcccccgataacgaacccctaaccgttgtagagaacgagagtcaaaattctgttattttggtaagatcttgttttcctttgaagttcgacatggtagtatctaattcttatctgagatttgaaggcgtagcttatcccatttacttgtgtatatgtttgagggagggcttgttgactacggtatcacgatggtgatacatactacaaaatcaatcagaactagagttccgaggttgaaaaagcaacagagtcgacagccgtcatgagagttttccagttttgttgtttatgttgtagggtttctcgttgggcagccatgcctacggagaaaggatcatccgttcctgccaatttctcaacctctgtaagtcatgtgatctcattgcgcaattaaacaccgaataactacacatagtgtcagaaatggcattgatcattccaagaagatgatatgggaggacaggtctcggtgacgggaagcctatacatggtagaagccaccctggagatagtcaagaatgagcctttctagaatcagcttgtgccctgtcatcgaggactcccgaatgatagatggattagcgctaggtcattggcaagctctctctctctcaatttgattatcaaggcacaaaataaggcatctaggcatcaacaccttcctaaagagggtttcgaatcatgaacgctatgtctacgtatcccggggagggtcacagagaattagggcccactactccgtactctgtaaagaaaccgaccaaagaaccaaacatctgagtcaaaaagtcggtctagacttttggaaatgagtcattgccaaaagcacaactctcagtactctgtacatcaagaactggttatgaaaacgagatgaagtcgaggtcgccatgtaaaggatactggcacctcccgtcttagaccaattattaaggacattgaaaccaacgtggcaccaaaagtgtcaacctaaaaggctctctagcataaggtgccaaggttgacatgccaataaccccacctctgtgtttcgcctgcatccacatttcggcattctcggagatcctggctctatcaggtcggtctccgagattggcgaccctagaccttcttttcgggatggaaatcagtcaactatcatgattccatagcaacacgagaggcttccgtagactcggaagctgtgtatctaggaacaagcgagattaggagccttttgatataactttgtatgtagacgtaatatacaagttgtacatcgtaaccttggaaaccataaaaccttctaagaggtggaccgagcttttaagatgtggagaagagattggcggcgcactgtgattggatcagactggctgactcagcttggatcgaacgaacgttatggcattatctcggattatcgaccggcccggtatttgtgcggaaaagaaccgggtattcggtaaagtcgatgatcggctctgttatatattatttcctcctcaacagattcattgacctctttccctctttgccttgaaatcgaatttcctaatccctgaatattcaagatgattacgtcatacttgttgcccgccgacagcttggtgcttgttacaggcgccaatggtttcatagcatcccatactatcgaccagttgcttgcgaaaggtttcagagtgcggggcacagttcgcgctcctaagccttggctcaatgcctttttcgatgagcgatatggcaaagggcgcttcgaaaccctggttatgaccaacctcggtgatgcccaagaattggataaggcaatgaagggagtttcaggtgtcatccacatggtcagttctatacaaaaccatttaagaaggcaataacttcaaatttctaatcattttcaataggcatctgatctgactttcagctccgaccctaatgccgtcattccttgggtgaaggattctgtgctcaaggttcttgaagctgcatctcggactgagaccatccaaagggtggttctcacttcgtcgtcacgagctgcctttacctccttgcccggtaccaccaagggtcttactgtagaggatagtaagtatttcgcgcattcaagtctcacgcattgcaggaggcgcaaactaacatcctttagatacattcaacgacgattcagtcaaggcagcatgggatccagatacccccgcggatatcaagccttttgctgtgtattctgcgtccaagacagaatctgagaaggccgcatgggaatggatgaaagacaacaagccccacttcgacttcaacactgtgcttcccgacttcaatgtgagaattttcaattctaaagaaagccacgaactttactgaccaaatgtcttttcatgctttagaccggaaaggtccttcacccagagattggtggctcgaccatgggctatgtgcgcaagcttctcaagggagatagcagccccttcgagactttccctccccgtaagatcccattttctctcccagtcttttggaacattctctaatacttggtccctacagagtggtatgtcgatgttgaggacactgctcgtctccatgtcatcgcactgctcagccacgaagtgaagtccgaacggctctttgctttcgcagaatcaaagaactggacagaccatgttgaagctcttagcaaactgcgccccgacaacaagttgatccccaagcctcccgtgaacgaagctcgtgacgaagcaaatgtcgtcccagccaaaagagccgagtctctactccaatcattctacggccggccaggttggactccattccacgagagtctcgcagctggcatcgaagggttggaatagaagtgcgatgaagagctttatatgtgttcgaaatgagggcaccagccagtatatactagtacatattcatcctgaatgctgcatgacctctgcatgggaaatagcccacaacaatacatatgtaccggataatgcctggcactcgagacctttccctttccgttttagcgctcacctcttgccgctttttgatcaccgagtaaaaccgagcacgtctctgagacacggcacgtgtacactagggcatgtagtgatagttcagtgatagtcgccctctcggcttaggtttttgacgcgacgcgctgatcacgatctgtccacgtgggtccccggattttcgtgctccatttttgagactacataaatcgtggatgattcacgacctacttgaactgggggtggaaaattatgattaattactccgtgaaaagttttcgacgcattgaaaatgaaatctagcatctatgtcgcgtactagactcggccacttctcattacagaccgtagacaatagcaagcacaggcccaacaatcgccaacgcaggtatttcacagccagcagctaagccagtcgaagtcgcactcgctcctgtctctgtagcagcgctttgagaacttccagagctatctgacccggtcgtagttgtagctgtagctgtcacaacattatccgttgacgacaccgtaattgcacgcgcgatagtacccagagtccaagtaaaagtagccccactaacaggagacgagacaacaccaccggtattgtacaacttctccgtcccatttttaggaagattgtccggcgtgtagaaagtatccgtaccgcccgcaacctcatctccaaaaccaagtttcttacaagggaatttttccatgtaagtactacatgcttccccatcttctccatccttcaactgtccaagccagtagtctgctcccagaacagccggatctgtattagggcattcgtcccagatggtggatacaatcgcgctgtaggaacagcaaatgcaggcccggccatagtcggacaattcgtcggctgtaagctgctccaatgccttctcgtcattcccgcacgtcgtcaagtggttgtttatctgggtggctttgaggtcgattttcgcgaaattgcaggaacagccgcccgtcgcgtttccgggaaagggccagaaggggatttgttcaaggtcaactttcgggcagaagttgactaagttttcgccggttttttgatattcgcaggaatagacctagctggagtgtcaatttatggcagggtattctagtttgtaagaattacctggttccagcagctctcagccatgcaatcgatctcattggcattcttgatgcattcgcaaacattgatacagtcaatacctaggtttgggcattgagaagccatgcatgaactatcgccattgcatgctttgtagcatgcagggtctccgccagcgcagttgttattgatgcagctggcgtacctggtatccgcgtcttcgtagcatgtctttagaccctttggatcagcgcagaccgacgaatcgtcaaaatacccgactttctcggctagcacaattctggaggccgccaaagacagcaaaagaaacaatttaaatgccattttttaagcgcacacgagatacaaacacaaaggatgtgaatagggtatttatctaaaaattcatgacctgtaaagccgcaaggtccaaaaggctaaagggtcccaggatccaaagcgtggctagtgcttacgcccaacacctgaccaatggggctctaaaaagacttggcactcagcgatctcagtttgtttatagctagtccgagacgctgcttcgtttgattttgcccgaactggcttaatttgacgctttgccaagatcaagagccaattccggtgccggctctcctgtgtccatttgcaggggtacacgcttggaagcacgttggttccggggcggaaaagccacgtcttggcacgggatttgaactaactgatttttctacagcctcgggaaagttgttgcttttaaatggctcgcaatgtggcttcaacattggtggctttaaggcttgtatgagactgatagcgattttagggttcggaatagttcccgtgtctgctctttgggaaacaatttaaaccgcagtttgatcgaaacaagtgttccattcaggaaaaggaaaagggaaaggcttcgggagaccatctacccaaggcttggatgtggtcatcccttaagcctgtgtcgtgggtgtattgtgctggcccctccccaaaactgtgacacttttatccccgtagtatcttcccggcgcggttaagcttagagatgaccgcagttgaaaggcgggtgacgtgaagggaccggaagagagtgtaaatcagggagcagtcgtagactttgagtcatggaggaatagtttagaaaggccttcgacgggacaggctgcatcttttgtcgctgcaaggacaatattgataccttcgtggtttcggtcggtcttacttacttttaaagtaggggaagacatggtccatagtaggggtaaacctgatatcggccggggttaacttggtagcagcgaatacttcagtgtttctaagttcggcagctaagtatgtaaattttccgactcggaggaaccccgcgaaggcaaccctggcagcggcggcaagattagggtcatttttctgggctgctgagagccttagcaattgggtagggaggtgtgagatattccctgaaagaattatgactgaggccggtgagattgggttgggaactgcgcagagcaatatcctcttctggttccctgtgcaaggccattccagaccagctttgcatggccagcactcacgaaaatgggctgtcgggagaaataggtaggcggtggcgcctttcctatctggtcttgcccccgattttatgacgatcaaagagaaaggccacacggggctatttattttgtgttgagtttgtgttgagtcgtcctggtattgagtgcgttgacgatagttggctacgctcgttttctggaggatcccgtaccatcaaaaaatgcgtcgtgtctatcaaaacgcaaataaaatagagaagcgcatcatattagaatggtctagttttgaaaagaaaatatcgagccgctcgcgcacgttgcgctggctaattaaatgacatacttcgaaactgttagcacatctccactacccggaatagcactatgaacttactgggatgaacaggtaggggacttctttctcgtagcgcttccaggcctcgccgtactttcttcggcatctgttgatatccctgttggtgcgatggatgatcataaccatgaagaaaatgaagtagaaccaagggaacgggctcctatcaatagtagttagttaccacaacatcacggctttgcacataagaagtcttacttgaaaccggtgatcagaccccaggacatagagaaaaacatgtcaggaacatagtttggctttcggataattgcaaaccagccatcgaccatgatatggtcgcccgcatccgtttggatggttttgggattctcgatagcctgccacggcacttgagggaatgtgttccgttgtatgagctggcccttttccttgtggcggaatgcattcttctgaccattggcactgtcccacatccagtagaagaaaatgtacagagcagagaacactgcgagagcgtaaggattccagtggtattcggatgggtggtggttggccaagtagagagcacagtggcaatatgtgaagggcacaccggccatattccaaaaggtgagcaaaaagcctagcttttcaaaatacatgtccctggtatagtgtcagctcaattgtaactattgctccaacattttattaactcaccagctggtaataatcatctgctcagctttggcacacgcattggtatacaagtaatgtgccaccaccaagaagattacctcgggcgaaacatagccgtaagtttcgtactggcgagcagccacggagcaggtgatgaggaagagaatgaaccacgggatccggacttcgtaaaacatcttgaagtccaggattccaatgcggggattcagctcggcgcccataaagaaatcgtagattggagagcccgatagtctgtgggttcggccgcgcacgatagcttggatgtagactatgaagctgttcaagaagccagagaggatagcgacactcatgataggtccaaactcgtcaatcagcgtgtacaaagggaatacacgagtaacgtgtaggacaacagcgatggcgagcgtcgcatagaagctgcaataagcggagcagtagtaggggagcctcttgccgccttcgtgcctcaatggccggccgaaattcgaaacaccgggcatgtagcaatacatgagtgcctcgaggacaaagaatgtccagtatatcgcccaggctttcgcgcttggataagctccctcgtagaccagctgacataggtgacggccaaaatcagcccaggtctggttgggcttaggcataggaagcatgccatcatagtacgtggcaccgatccacatgtaccacatcaacaaaggaaatcccgtcatcaacagcgcagcaccgaatgaaccaccgaattcgaattcatctgacgcaccgtcagtaaacttggtcggggtagttgatccatcctccttgctcctattagctggaatagaagcaaccggttgggttctctgtcttatggtcattgccattgatcgacgtgggtgagggaagttgtcaggatgtcgaaagagaactggcccctgatatttttgctgggattagatatttaagggcatcaggtgaccacgcgtgcactcgtgtattctttggtggcttgggggccaaaacatcatttccacacaaaacgagtacctactcaataaaaccatcatttcaacctatacccctatagtagctataataaatttatgctacataggtccctgagatcccgctctatccttcgactatcaatttcctcgtttttctctacgcgtgctgagagatcggcccgagtagtggcggttgtattatacgattttcgcgcctaccgaattactcggcgcatcccgagcaaagtggggctgggaaaacgatttcaatacgataaaaattaattttctgcgtggcagaaaatagtcagctcgccattagtccgcagctgtaatgagtagacaacaatttacccctacgtttcctctaattactaacttttctacggtcgcattgagctcagatcgtaaaagtatgattaaaataccttttttaacaattgtatacgttttgacctaaatgcgactagtagaagccgatcagcaagcacggagcaagcaaataaccaagtaaggaagtaagtaaaccgggcgtcggggccgtcccgaggtcttccaaggtttccatccacccgtagaggtaaatgtgggtggagaagaagaggctctaatattacataccgggccgagaccataattacacaggcggtgactaaagcggtgatccaaaaatagccatccctgactttagcgcccttttgggtaatccctcttagcattcggagtcaagagatgacagacttcttcctatgttgtagttaaaccttgtcaactcccttttagtcctatcaccctggcacccctatggccataggatagcatttcctatttcggctgcccatgtgcacaaagctgttgaataaccagagaaatagtggacttttgttgccttcacttatgacatggtctattaagttaactaataaattattttaagtgaaataatatctagtccatattcctgcttcacacctcacccctgtgttctgtccatctcatactaccaattggaacaaccggccccatccctggaccgccgtcggatcaacctcacacagtagcaacatgtcccaaatgactgtgctcaccgtatccaaaaccaccacaccatgcgtcttttcccagtagttcacccgctgagcagctcggagattggtgcaaaaggtggaaatcacctgcacctggcggctcgcgacgtcggctaccatctcgtcgagggtaggctcatcaacgtcggcaaatgaagtgttcctcgacaatccaagatggcgttccttgctgcaatccacgccaattgtcttgtatgtctttataatggcctcctgtacgttgtccatgtacggtgtcacaagccccagttctgtagccgagagcaccttgagagctttgttcaaggccaatacggatgtcgtggccggtatccccgtcgccgcggtaatgagtgtgcacagctcttcatcggcggggaagcctagccacccagatgacgtgccactccagccaatgatgtcgacgttggcgtccgccagcagccttgccgctgccaaaatagcttcgttttggaattgctggagggcatcctgctcgaggctgatcttcaaaacggtaaaccgagaaaagtgaaccgagacattgggaatttgagcgatgactgcttgcgacaagggctcgaggctggtattggaggaaggtgtgagaattccgaggcggatacgcttagccattgtagagtgatgatttatgaatgcaatatttaacagctgaagaattggagctcaagaagaagaaatagaactaggattgtaatcaaatcatgaaagatttcagcttctccccgcattcccccacgcgggatacaatcaggaaatctatatcgcccgatctttcaatctttccaccaattttcggcctttgaccgagatattattcccccacattctgattggtctccccaagttactatcagtatctagactccaaatcagtcagaatgaccccaatcgttctttcaggaagtatgttgatgattggggttagagatggcttaataagaatcacactgtcctcttatttcgtgggagtcatcgtcagttgaactaaacaacccaaaatgtcgacaataaggcagcgatttacaggtgccaagcgggccttctccagccggcgtgcgctattggaagcagttcgtacagaaaacgacggggaggctggcctcttcggcagctggtcaaataaagatttggacccgtctcctccttctcagagaatatggacacgttggtctttctttgcttttcagtttagcatcgctttttcgccgaccacgtacaatgtcggggctagcctctacgctgtcggtctcaactggtggaccatcttgatagcttcctgtgagactatattacatacctggtggccgacggtgctaacatataaacagttatcgtttctttcttagtgggtggaatgctttggttgaactcccgtggagctgcgatgtatgtaacttcacatctaagtctagcattccatgtctaacgatggtttctccagataccacgtgggatatccgacttacgtgcgggcttccgccggtatctatggatccctaatattcatcttcctccgaggggtatgttgcagcaccagcaagacttgagagcacatctaattccactccgcaggcggtcgccattttatacatgggaatccagactctatacgctagttattttgtgaacgttatgcttcgttgtgtctttggtcacaagtggactgacctcccgaatcgtatgcatacctgtcttgttgtccgttccagagctaactatgtcttcagatcttcccaagtcagccggtatcacatcgggaaagttggtttccttccttattctatggcttctccagttcccgttcgcatttgtccacccgagcaaaatgtcaaaagtgttcatggtgaagtcggttattgcaccaattggaatgattgtgacaatgatatgggcaatcgtaagcatactcttggtcttatttgagggcgttatggcttacaatctgttagatctctagccatggtgtcgatttccacggactcggacctagcaatgtgtctggggccgtcctgggctggtctttcatgaaagcaatcaacagtattgtttctaatgtgattcctccgttggttaattctcctgatctgacgagatatgcgaagtgtccacgcgacactctgcccttgtctattggaatcatcttgagcaaaccagttgtggtgttcctgggaatggtcatcacagccgctggttacaaacagtttggagaggtaatctatacatccagtgcttgctcattaatccgatactgacttggaaataggcatattggaatatgtgggatctctattctagtatcctagaccattactggagtccaggagcccgaacggttgtgttccttggtgcgggtattcaggtcagcaacctatttagcaagatataattgcccctactaataactttgacaggcatttgctacctttgctacaaacctcactagtaactcaattccagtcggatgcgatctcgctggtctgttcccacggtacatgacaatcatccgtggccaagtgtgctgcttcttattggcgtgggtagtgggtaagaaatcaaactattatcatagaaattcaccagtctcaagctaatcacactgcacagttccatggaaaatgacctattccgccgcgtccttcctgaccttcctcaactcatacctctgtttcatgtgccccattgtagccatgatgatgtacgttcccaaatttgccccggaatattcaaccactaacgaaccctctatcagtgttgattactggatggttcgcaagggaaacatccatgtgccttccctctataacgcaaaacccggctctccatacttttatactggtggcttcaacctacgcgcatttgcagcctggatcggggcaatcgtccttgtcattcccggtgtctctggcgctcttcaccctggatcgatcggagacgctgctgtcaagatttacaacatgggcttcttgatttctaccactttcgcggcgctgttctactatatatgctgcaggatttggccagtgcaaatctatcctaccgagctgggggcaaaagacgctagttgggaggccacgaggtacacagagggctttttccctgaagacgaaatcgtgccggactatttgcaggaaactgtgattgagggggtgacagtggggccttcaaaaggctcgttggaggtagaatccgtcaacatgcggaaggagggaatgttgtaatggctgaacagtgattttatgtgtttgatggattttatgtagcttttggatttgaaccagtacgtagtaataagaattgttaatcatatttccttgttaattgggttctgataattttgacttctccccatctccattgctcgtaaattttctcttacatttctaccgtagcccctcagcctgtcctgataatgcctcgaggctgtcaaggcaattaccatctaaatgtccatatgaggcaatcggacctttccgcaaagataaggccgtgttccttggcaaacgatcgggcgatcgggcgactgatcggggagttgataatattgttgataatcggatttcggaccgagagagtatttagcaccaatgagactaaaagctaagttttttatcaaagcctcaaagcaaattcgcaacaatgaatttaccctcaatggctagcaaattcgatctggtggtgctcaacgggaaggtagtcactgccagtgacatttggtatgttgttctcccctctagactgtctataacgtactaacaaagcgaagcgactattgcattgggattaaagatgggaagatccaaaccctcgccgagagcttctcggaagatgagatagcaggcgccgaggtcatcgatgctgagttcgttccaagtaggcctcatgacgtggatgtggaactctaaccattgcatctatagaggggcatatgtgatgcctggtggaattgacgctcacgtccacttatgtcaagatttaaaaactggtgagttggtacctcgtttacaatagacttttcctaacattaccaggaccacacggtctaggaggtgaatgcgccgataacttcgagacgggctcccggagtgcagtggccggtggcacaacgacaattatcactttcgcgacacagaccagaggagaagaagaccgaagcctgatcaaggtcgtagagtcttataacgcgcgtgccgaggagacgggcagctacgtggactatgggttccatatcattattgttcgcaatgatgccgacgtgctggagaccgaactcccgattttgaagaaggactggggcattagcagctgcaagctcttcctgacgtatgaaacacaacggttgacagattcgcaacttttggatgtcatgtgggctgctagaaaaaactccatcactacggtaagtatatttctgaagagaaacgaacgacgctgattttgtagatgattcatgcagagaatggggacatgattgcatggcttacacgtaagagtgattgagcacggtgaagaatcagaagctaatcggatgacagaaaaactcgaggagaaaggcatgaatggtatgtctatttacactccggtctgttgaaattttgcttacattttatagctccatactaccacgccttgtctcgcccacctcttgtcgagggcgaggcgactaatcgcgccattgccttagcgcaattgatccaaaatccgattcttttcgtgcatgtcggctctgcagtatgtctacctctctgtcatctcagactgaagctaactttttcagcttggggcggccaatgtacgtcgggctcaaaatatgggattacccgtgtacgctgaaacatgccctcaatatttccatttaacatggaatgacctggtaagtttcctacatcgatcgacaattggcaagtcctaagagaagctctagaaacggttccattcaccaacttgtttcgaaaacagcaaaatgatctgctcacctcccccacccccggatgcttctgaccaggaagatttgtttgtgtaagtctcgtgtgcaagtgtcataccagtaaattcctctaatttgcatagtggccttcacaatggaacattcacaatttactcatccgatcactgcccttttcgctacaatgacccccatggcaaggcttctggagtgcttgagcacgccaaaagcatggaaggggagtcaccgcatgcctgcgatgatctacatgacctcttgacacgcaaggaagggtcatttaaattgattcccaacggcattcctggtgttgaaactcgactcccattactctactctggggcactatcgactggccgcatatcaccacaacgctttgtggaacttacgtctacaaatccagcaaaactggtgaatactcttcaacttcgtctatcatcctatgacatcgctaactcaatatagtacgggttatatcccaaaaaggggacactgatgccaggatctgacgccgatttggtgattgtgagtttcaatttcctgctacaacctccgattcgagtttctaacattgcgaaatcagtggcaccctgagaagacgtttgagccattccatcttaccaacgcccaactccaccacaatgtcgattgtaaggaataaattcacaccatgtctacgcatttaactgactgcattacacagatacgccatacgaaggattcaagatgctcaattggcctcgttatacgattctccgaggcaaagtgatgtgggccaacggtaagatacttggtaaggtccgggatggccagtacgtgaagcgtggtccaagtcaactgagccaaggccttcctggagccgatcgagacccacgacgcgttgcagcttggctctatgaatgaaataagagtgtaatgatgcacatactttggcgtcttcatagacttatctagctgagacaaacacgatcaatatagacatggaaaatagagaatacaaaatgggattatgcctatcccactcatcgtggaaaacgggaacattggctctccttctatagtcccaacttcatccttattcctaggcacaaataaaaattacgtaaggtcgcaccttccgagattattccgaagataagaagcttatcgcccgaaagataaggtttcccgtatccatggatatcgcgcgaaagagaaaggcaaaattcccctatcacagcaccttccgggtatggtatggtaattcgggtatgtgcaggaagaactgtcaatcggaaaaggaaagcttggaagaatcatccaactatcttactatcaggtcagccttctaatagatccatggatacttccaagctcctgcggccattccagcagacgcggtcatatgtggctcacctcggctcgttaccatataagcttatcttcccaacttgcctagcctgcacaacaattgggtggtaaccgttagcccccgtcccccccacccgggcccgggccccctagtaaatnnnnnnnnnnnnnnnnnnnnnnnnnnnnnnnnnnnnnnnnnnnnnnnnnnnnnnnnnnnnnnnnnnnnnnnnnnnnnnnnnnnnnnnnnnnnnnnnnnnnnnnnnnnnnnnnnnnnnnnnnnnnnnnnnnnnnnnnnnnnnnnnnnnnnnnnnnnnnnnnnnntcggtcgccacgaccgaggccaggcccatgtagtagatagctctctcctcatttctctcctttgattttccctgtctgctccactacatactggagcagcacagttcttctctcatagagatcctcattgtgtagcagtttctaggacaaccaatctctcgtctcccttcgtgccgtcgatggcctgcccaaatggatcactctggtccaaccgggcgtgcatatagatcgaagatcaaacggccttgtgaccgatgtcgactcaggaagacagcctgcgtccttccagagggcccaccctgcaggagttgtttcactaataacaaagaatgcaccttcaaactgcgtcccagattgaagacccggcgtatgagtacagaaaatcaagctcctcacgctactgcgtcttacgaggtgccaaatccaacattgcaactcagtcctgatagtactcgattgcaccacgacccgttcgaccaggacaggggctactcctacaatgatccagtccaaatgtggccggggcaacatgctcaaaatgagcctcaacctgatctcatgacccgtcatacctcaatggaatctatggatgaccatcctatcagtccggatcaagagtcaccacagcaaatcggggccattaccagtcctgcatcgcagcccgttcagcgcatccggtcgctagatctcattgaaggatcgatcgcgcagttttacggcatgtcctcggagtcagatccgtggctgcttcgacattgccgatacgatgaatatggcatgcgcagcctgcatcggactcacatccgtaatgtcggtggcgtccccgttgaagggctggtaccggtccattttcttgagaccgagaaggagcttatgctgccaaaaggctcagatatggataatcggtctcagaaggacgtgatgcaagaccggaaccaactcaatgatatggtctccccggaacacggcaagcggcttctatccttatttcttcgattcgtgttcccagccgtcccaataatatccaggtcccagcttggtattacttcaggagtgtcgactgctgtgttggagaagatccccgttcatttgcttgcggcgatttatgcctcggccatccctttcgcagtccatgactcggtgctgtgtgtatctgccgcatatggggagctcttgtccgagaagctgtggcatacggtctacgagcttatcctccaggagactcacacaccaaagctggcagttttgcaagcatctttgctctatctgcaacaaattcccgccggaagcctgaaagccctccctgatgggccattcatttggtctttccttgggtctacagtggccctggctgtctccctcggtcttcatgttgaaccccggccatgggggattcccccgtgggagaagcgcctgcggaggagactgtggtgggcagtctacgtagaagacaaatggcggagtcttcttacgggccggccttcatttatccaccctgatgagtttgatatctttgaccttagtgccggtgatttcatccaagatgagaaagccgacgaacatgaccataattgccagcctcttttctactacactacaggtttggctcggatcatcgagaatctgcatcgcacattttagtaagagcaatccccacccctggttaattctgctattaattgaacagtactataaaagcctctcagagagtatcagatgactttcgcgcgtccatcgacgctgcacgacccatccgcgcccagcttcaacaatggtacttatctcttcccgatactcttcgactcaagcgtggctccgtttcaaatagccacatagcatctgacccaatcgagggtgcgtccgaccttcatttctcatacttggttcttgagatgttcctttaccgcgccattctccgtcctcttgcccaatcaccgccaccgccaccgatctcagacgacacagatccaaccccgatgggagctttctggctcgttgaagacctaacgttcgacactcacggcttcgatcaactcccagccatgaattccatgcagcttggcgaggctgaagaggctaccctcaaggctgcagaaaagtgtgcggccatcatcgtcaattttgtaggagccttggcgccccatgagtttggctccttctggcatccttgtaggttatccgttcatccgcttctaatgtaatgatggaattgtatactgactatctattttctagggaaccgaatctgtttcgccgcagtatccaacttcgtcactctgctccttgttcaagcgccgaccaggcaacatgcattgagatcgagggatttgcttgagctgtggtcacacacacttcgttgccagcactggagccacgaaggcctaatgaagctaggtctagtgcgactaaatcagatgcagatcgagggattggagaacatcttcaatttgcctgcgcatgtatccgagatattaagggatacacagcaagattaaatccctagtttcggatatatggtgtacaataatgataaaaacacaggcaagctagttcacattttcagagacgacaaaggatatgaaacgatttttgccgagagacgcaagattgcaaacttgagacggtctgattattctgatatattatgcctaatatgactccaattcaagctgtacgatactaaacagataactgtctttccatagcccaaagaacaaacccttgattgtaaccccaggtaaaaggaggataatattgttcccccacgacgcgaaacccccttttcagccaataagcaccctggatctcgcgaatagatctgagcgtaatgcacaagcgagacaattcaatatgccccacaagagccattctcctcttcagctcctcttcacaagccctgattaagcattccgcaatgcctttcctcctatatcgaggatccggcttgatcgcaacggctacaagctcgaacccgcccttccaatgcgcatcccggtgtttatcgccagaactatccagcaccgcagagctcgcggagaagatctcatccgcagtgaattgttcagaatagcccgggaacttccacacgtcttcgggatctggcgagctgatcttcaagctcgcagtaccgatgatggaattttgagcgaatgcaatcgccgtgaagccggtttcctggagctcgtcagcgagctgggtgtcgcttttgagtcgaagtccgctctttttgtaagaactggcgccggtatcgtagtagctggcgttgatgacgtcctggagctcttgcagaaagggctgcttgaggagatcgctttgtgtgaaggtttcaatactgtaggaaggtgagccttctacagtcgtagacattttgtggtagaaaaagacaccaagatgaaatgcggcaaagcgtatgatttttaagatagccgcaaaccccaattaccccaatagcagccagtctgtgcgcttctccacggtttcataataagcaaagctaaaagtacaaacaaactatgaaactctcctatagtccctctgtaaggtgcctgagaagaccatcagaaaggaaagagcgatggaaccaagacataccaatgttatcacagtctaaaaggcttgaagttagatgtacatcaaaacgaacgaaaaagtaaatatttcattaactattgcactataaatccttacccattggtatctccaaatactcaaccattctctccctcgcacgctcaacctgatcccgcacatccagatcccaaagccacttaaaacgccgatcaagggtatctctcagctttaccgggtcatcacgaaccccctcaaagcacaaacaaagaatatctgcattctccttgctgctagtaacaaccctctgactccgcggccgacgaatctcatcataagccttgaaagccgcaaccacgccgacgacagagctgacacgggaatcactcagtagttcggcgaggacatgtgcatcttcgatagcctggccagcgccggcaccctggtgcggcgtagacgcgtgcgcggcgtcgccgaggatggcaattctggagcgggtgtaggttgagaggtgtggatgctcgaagatggcccattgggatgggtcgggcatatgctagaagaataagataagtaattcacttaaacgcaaataaagcatgaatcatacctcaacaagagccctcacataccgccccatatccctcgtatcccgctccatatcttctctcttcgccggcctcacccaagactcatattcccaatcctgcgaactcaacacataaataccaacattaaccaaacgagcccgcataataggataagaaatagcataagcgccgcgcgcgacatacatcgtcgcgaccctcgccctcctctccccaaccgcactcaccatatcccccatatccaggacagcgcggtatccatacataccactataaaccggtttcgcacacagcgagtattccaccggaaacatgcactccttaacccgcgagcgaatgccatcacaaccgataacaacatcagctttcacgacctcgccatcctcgaatcccagcacaacgccgtcatcaccttcaacgagcgtgctgagcctcttcccgaaatgcacgatctcggcggggacgagctcaacaagcgtgtttaggaaatctgctcttcggagcgctgtttggccagagggtagggctttcagatccattagtacgtcgccttcttgtgggcctgttgcccagacgagctcgaaccaggtctgtaggtaagaatcgtagccgggactgtctgcgtgggtggttatgagggagttgtagatttgttggatttgggggtggattagtggcattgcgcggtatgcggctgggccgagggagattcctaggcctatttctttgaaggttggggctgcttcgtagatttggacggggattttgcggaggtgcaggccggctgctagggttaggccgcctattccgccgccgattattgttattgtgggtttagacatggtgagttagagatagacggatgggggtgtgttggtgattggaggtgttagttatatagtttctaatagtttctgtgagttgtttaaatttgtcgggggttttcgtgagagtgtacttgtgtataatgtcgataaggttgagtgccatagtgtatgtactctatatcccacatgggcgtatggtgatataaaaccggactagtaccacaatgactgtatgtccgacgtcgcggagtcagatagaggggtgcaagctttcgaaaacgggaaattttcgaatggaagataggggattggacaggccagggaagtgggctatcagacatcccgcggtggcccttgatctgcactgttagcgcggtgcgtgtaatttgccgggaagtgcacggcatggacgaggggtctacatcgtaggacgtcaacgctgttacaaggattgtcttgaatggagaaatatgacattaaacctggaaggtaaaagatatcgccaatcgtcacgcgtcacgaatcgtgcgtttgcgtgtgcaactctaatctatcgtgtgtatcccattccatgagacgagagagcggacatgtgctcgacatgtagcgcagcgcggtgatcgaagtcgcgatcctgtcgcggggatgcccctaggggtctgaaatggcgcattggcatgtgcaaaaaaagacaatcctaaagtacattgtactcttcaggaagtctagatatatgagaaagaaaagaaatatccgctagaaaaaaaacgggaaagtcgcatatgttgcaacatgaagaaatcaaatcataggagcggtcactacccgctgacgctcccactttggaggaccgaatggatcatcacgggagtatatatccgaccgatcccaatcggagtcgctgtccgcaatacccgtgtgcttatcatccgaccgcaacgggggagaactgttagagtcatctagcgcgcgacggaagcgaaggaactgccgcgattccatattcgcaggctgcatcatgcccattcccatgcccgactgcatggactcgagtgctgcacgctgcaggtcgcgaatgtcattgcgcagaccgccgacctgtgtttctaagtttctgcgggctgtttgttcgcggcgcaggagcgtgactagcgtgctatactgctcgattgagacgccgtggtagtcggacagggatgtggctgatgggacggggcgaagggtgcgcgtgttcattgtgtctgcgcgtattgtgctcgtgctggaagggcgggcgggtatggtcgggagagggcttggggaatcgtcgcggtcgctggtggataggaatgcagttggtttgctgcgaggggggtaagattctgctgaaggcggatgtcgtgggcgggatagcttctcggtgggctcgggcccgttggtttgcattcgcgcaatggcgaattccaggtcgatgagtttcacttcgagcgtggtcaaccgttgttccagagtgacgccgtcatcttggtgcattgtgttaactagatttgcgacatttgatggaaggctgggttgttctgtaggctgctcgacttccaaagatggtgcggcggacattcgcgtcacactcgttactgttgtccccgacgaccgcctcctcgactgctcactattagaactttcatctaatggcggggactgcgaaacaaccgaggctggccgcgccggggcggatggtgtgggtttccaagagctcagagtctctgggaggttatttgtcatttcgcgcaatccatctgcgctccttgataagcggtgcgagagcaagctgtgtcttcgctctggcatgtaacccctatcctcttgcggatcagatactgccgacgcgacggcaaaccgagagtcatcatctgagaagaccacactgggaagcgttgcccgccttcggcgtggcatgctaccgggaactgaatcacgaagtgttgcagaggagagaggggacagcggagacaaatgattatctgcgatctggaggttttccgccgagagtggactgcggtgtgaattcaaattcaagggcggcggaacagccgacggtgatttccctttcggttgtccacctctccgcaccggtggcatgggcggcaccgcaaaagtagattcgtatgggtgctcctccagttcatcggcctggctttgtcttttgcgattgaagatcttgcgcatgacagtcttcaaggtgctcccggttcggcggtgggcaatagagggctgtgagtgatgggagtggaattccattgacggcagcgccgtgtcgtcatctgccttgtacgatgtagggttggcggagcagtctccccgggcgggaggggttcgctgtatactccgaatggactcgctgccagcgcttgctatggatcgggtggggtatctcgacatggtgtgtggagggtcgcaatggacaaataggcatagaaggtaagggtaaggacttggatcattacaagctgggtatatggcgcaaaagaaagaagaaaaaaagaaaaagagttcaagcgagtgtgagaatgaagggtataagggtatcaattcgaatcaaggctggattttagtcgagtgagactattgaaagctatcaaacgcatgttagctgaagaaccagggtgggacaaacggaacatacagtgttataatcaggaacataatgaacacccagatcttccagtttgctctgaacaaagagaaaagaatgactgaagaagaacaaaggggaagagaagttggagaagattagggagggaggaagagggaagacagctattatccccacaccgttctttctttatgccacgccagaattgatgtgttgaccacaaatacaaagtgatagttgactatttagtcagctacctaattgctcaatgcttcataaatggtttatgcaatactaaatactctactctatcccattctacctacttccctccctcccgtgaaagatatctgaaacacgccgtcctcaggtgacacgatgcagtttcaacttcaacttcacttcaacttcatttgtccacgtagggcctttgattcatgctatgcccctcagtaagaagaatctcattctccattaggaaatccatctccggcattcttatcttcgtgtcaagtcagtatttgagttctttaggttctttagggtgttctaccccctgtttctcccttgcataggccgtgcactaatttattttcgacagcgatcggcgttgttctggaactcccatctatagcaaatctccagcgtcgggataccgcagatcggcattttcttcgagaaacgccatccagtgcttaaggaaactacttccgctgtaaaaagatcagcattaaccctcaaactaatggcgcatcctgtacggagtacgtactgactgatcgtctccgagtctccgcaaatacacaaatgccgcttggggcgcgtcatggcgactatacacagcatggttaatatattttcgctgtaggtataacacctatacagtctgcaaaaaaaaagagaaaaaaaaaaaggaaaatcataccattcaatcgtcgtttctcacccaggaaacccacttcgtgctccgtattgctgcgcactagactcaccacaacggcttctttctcacggccctggaatccatccacactaccaagttcaagaccgggatatttttctcgtaacatccgcgacagtagagccaattgcccgttgtaaggggtgatcacagcaatgctttcgggcctgacacccgcatcaatcagattatcgacatgtctagcaacgaccatagcttccatctcgttgcttttgctgtctccaagcaaggctcctttctggctgatctcatcctcagccttttcggggaaatccccgccttgcgtgtcccagaatactagaggttcctgcgtgtcgtctgtaccctctacttcatagggtaggtcgattagtagacgggcttttaccgcgtcgctagctatcaatttgccctcgtagagttcatccgaggggaatcgcatgatcttctcatgcatgcgatattgcgtggtcaacatgcgtttgatccccggtccgtgcagggctaataaacgatcaaataatgtgcgttcgagggagacacctttcaatgtctcggtatcggtgttgtcggtctttacctcgctcttggaagttttatccttctgtccggtagatttaacggtcggtggtaattgcagatgatcaccagcaaggaccaccttctctgcacccagaagagaaatccaacattgtgcttcgagcgcttgactcgcctcgtcgataatcacaacatcgaacttctggttcttgagttggtgaccgccagccccgtgaagagtagccaacaccacgctactctcccgcaccagattatccacgcatttagactcgcgctgtcggaactccttccgcagcagcttcaaatcatcataaatacctcgccgttcgcgaccagaccgcgttttgcgaatactagcctgtttttcatcaatctctttgcggatatctttcacaatccccccggcatcagaggtctgcgtaagaacttcaagagaatgctcaagaacagaaggaagcagacgagccggatgcccgatgcgcacaacaggaaccttttttggagccagacgttccacaatattatcaaccgacacgttcgacggtccgcacacgagaacgcgcttcttccgctgaaccaattgcagaatcaattcaatgagcgtatgtgtctttcccgtcccgggcgggccatgaatcagagcaatatcccgcgaagccagcgcaaaccgaatagcatccttctgcgagtcattgagcgtgggatcaagaaactccacagttccacacgcctcagtatccagttgtagcggggtcgtatgcccaaacgcaacacgcatgaaatgcgagtaatcagactccgtcatcttctccatcttctccatagtctgcctcatcctatccaggagtcagcaaccaagcaatcccaaaccaatattccaagcaacatacctcctatacgtaacatcgttagcaagcttaatagcccacagcttcttcccccacagctcctcaacagcctcatcatcctccttagacgttgccccgccctgccgcccaaacgcaatccacacagcgcgatcaccagtccgcgtaacaacgccatcaactcccttctccgcatctttgttcttttccttatctttctccttccccaccttcttccccgctcccgcaacatcactaactcgcacaacatccccgacgcgaatcccatgcgacccaagacgaggcgtcccatctgctgcccgtgactcatctgatgcgattgctgggtctggagcgaactcgccgaccacgcggccgccgaggccggttcggcattgtgagaggatgaggcctgttagggcgtagccggttgcttggagggttcggcgggtggagggggagactgttgcggctgtgctggcgagtttggaggaggagacttcggcggcgtgttcttcgaggaggaggttgagttgggttgaggcgaagagggggattgggattggggatggaaggggcattttgggcgacttgggttgtgtggaggttgtagatgggatctctggagagatactgcgtgctccagttgactggcacggtattttgttggtgtagattgaacttccactatggaggagttgttgagctttcgaggtgcggggataaagaagcttcagtcgcttatgtccgagctcgggatgattttattggctgtgggtttaggagcttcacatgtattctacagcaagagaacaaccacgaccaagagctaatgaacccacgttgttcgtatccaagacagcactactggggtgagaagctgccaaccgtgttaagtccgcattcgattcactaagtatgccaccttggactttcatgttgcctggcaaaatcttagtcatccacgacatgaatagaccgcctgatataccgccttcccagttaatatactgccaggaggtcccgaggttcataaggttgccccactccccaatttccccaactccacaacatacctctctacaatatacagttctttttgcgacttccaaaccacatcccctagcccaagctgatcatggcgctcccttcagaattagcagcgcatctgagccccaactgagtttccactcacagggaagagaaattgaggagacttggtagacgacgtttctatatttcatgacaccaatacctatcaggtttctaaaatcctatgtcaactaccttccaactatctatcacttccaatgtttacaaggcagtctaggggagcacgcaagaactgcatcattcaatctatcaatacacgtgaccaaaatgtcttattgtcctttacaggcactgctctggcctgtaagtttcatcgcctttttggttttgttcactttttttaacctcttcctaacgtatctttagaggagcgcccagtgatgcactattctaaggccgagcgcaataatagcgtaggccaacttgcgaggctggttcgtcgagtacagtcgcatacctgcaatacatattgccaaaggaaaaacaaaaggcatatcaaaagctgccgtgaaagaagaaaaccgggtggccgaattagttcgcctggcgggagaggagggccctcgcaccatcgtcctcatcaaattcatagtggcgggtggcactctcaaaaggaactttcgtggccagctgaagaccctccctgtctgtcggaaaaaagttctagtgctccctcaaagctcccaactttttctacagctgataagacactactacaatcagacgacgcaaaaatattcatgtactccattaacccagtcgctatggttactcgcttagtgctttcgtcagcctaccaatttgggtaggaattcattttcctactcttctgggccgcgcgacataagctttccagatatgttacttcgctatacgggattagctagaatagcgtgctggcccacgatctaattggtggcagcccggcggagatgtccagaatggtcacattgagttaggtgtgcgcggccatcggaagccagtacgtccatgcaagcgaaagaacaccaatagccgaagttgtctagcaaaaaccatcccttgcggaatattggtgtcttgacttgtgatgaacaagcacaacttgatatacgcgttggcacgagtgagttaccatacacgcttctctcaatcgactttttatttactaaattctatagcacttcagttcattttggggttcgatcttgctacgactatcttccgccttttattgttgagtcagatcggagcgaattctggaatgcattaatgaatgatgtgagcgcggagatagttgtgctgccgctttcattgagtggaatttcaccgtcgaacgcgaacgggagtcgtgagtggttctgtggaactatatatacggaatcgagatggcatgccggtgaaccgccaaagtatattaaagacctcgagtttcagtagtcaatttactaacggcgtttaggaaatctccctaatttacccggaatcacaaccggtcaaagattgaactgagtcgccaagaagcatttggcccttgccttttcccgacccaacagttccaaacctccaagcgatatggtgtaccttgtgatgatctaaggggaacgtacctgccactgcaaaaggagcacgtacaaaactggggaacagaacgcacaaatagttttcctttttctttcccctcttgtactcggtatttggaccaaatcgcactcattcatctgaattgatctggcacgtaatatctctgaagaaagacgatctacggatactagcgcttctaagtgcaaaaatgcctactttgctttcggtttcccacttcccaatggcatgacagttctgtgtgaccggactagtgccatattcgatatttgtttcattcacggtcgacaggcgatcgagagagttggaccgccgatgttcaatccacgccctggccgagggaactgcttccacggggctgcgattcatacttcatatccaaattagacgtctcgtcgaatgagctggtcgactacgctacaaatcttctagataatttgtcatcggaccgagaatcctgcaatgcatcttcccgcccgctcatttttggcacccatggctctgggaggctggtctgcaagaaggcgaccctacctactatcgcgagacaatccgtaaacacatatccagggtgtattccgtgctctcaagggtccgatatcgatgggtactcctcacaagggagcttggatggcggattgggccaaaatttctgccactatgtttggtttcgtggagtctaccaatatgaagttgctaggtgtcggctatgcgccccgtatcatatgggctgatcataccgatcataggaacatggtcaaatttgtgtcggtggaagagactggttttaggaggtggaattatcaacgagctagatcggttgacccctgaaactgttgctgtctcatgtcaggccacggacgctcggttagacctcgtggctacaatccttcgcggcctgatgtataacgacagcatgataagactggagaaaggggtttgaggatgtgcagggttcaaagagtggtgaagagtcgccctccaataccattcttaggctagggtggagattgtagtttcagataccagaagagatggggatggcttaattaatagagatggtattttctatgtggctttccctaaggatagccactgtttcttgacatagtaaacctctgtatagaccctttaatcctcccggtaaatcttgtgcaaaatgtctcgtcagcgccgagcaagtgatgttatcttcttccatgagcttcacaaaaagactgccgtttgtaacagactatgaaagttagtcgccggtcgttgagcatccgaatatagaatgccattcaagcaagtctcggaggaggcgccctctagttaagagattggttccttcctcagccccgtcctaggttccagggttggttggggcacagatcctcatttgcctgttggccatcgtgacctgtcattggcgacggcgaagcactgaggattgtgcgtgacagccaccagcggcaacggtggcccaggaatacagcatggctgcccccgtgggcataaccttccaaacaaaggagtcttcgacggttgaatcaaagaaagattagcggtgcctggtccgtgcgccatgtgataattctcattcgaagccacaatttcaaaggctggagtttcttcgacgaaaaatcatatcagaccgttataaaaaaaacgtatgacgccactttctcttatccagaggatgaaatgtagaaaatggaccagtaatccacaagcagacaagtcaatcaaagagcctcgattttgaccttcggctcatcaaccgcgggactgcttttcaccttcttcactgtcggctcaagccctcgaatctcgctcttacaaagtcccaaacccgccagatcacaatccccgcagcgacgtttaacgggcaagcaaaccgtctgcccaagcccaacaagcaacttattgatctcatgccatttctcatgtggcaaccacgactgcagcgccttcctcgtctcctccggcgttttagttttattccaaccccagagattggtaatgcgatgaacatgcacatcgacaccaattcccaagtgtttaccccatgccgcgctcagacagaggtaagccattttgggtcctacgccggggagtgccatgagaccctctggagtcgaggggatatccccgccgtactggtctcgcaggatcagggcggtggctttgatgtattttgttttgttgttgtggaagccgactgtgcggattaattcgtttagtcgcgttgggtccacggctaggatgttggttaggttgagggtgctgtcggtgggctttgaatcctcgttctcttgtttgactttgatgtctagggctggggagctgccatctccgagctcggtgtgaagacgttgcatcgctactgccgtgactgtgtcttttgtctgggatgagagcatcagtgcgatgagggtctggaaccgacgatctcttggcgatgacgcgcgccagtatagctctgagcagcccattgtgtctaccggtgcagttgggttgtttgccctcatttctttcacgatgttgtacatcgtctcccagttggacgggggctcgaccttgactgagccatcttcgtcgcgggtttttcgggcagggagtcgtctttgtttgggtgctggtgttggtttctgatcgggctcatccttcacgatattgtacatcgtctccgaattggacgggggttcgactttgaccgagccatcttcgtcgcgggtctttcgggcagggggtcgtcttgccggtgttggtttctgatcaggctcatccttcactatgaccttttgtagtttgccaggacttgcgctctgtttgaggacgcgtgtggttatgaggctcgcgttgcgcctttggcgcttcgttggtggttcaaggaggtcttcgatgtcggccgtgtcggcctcagagagatcggagagctcggagagggaagattcatcctcacttttgacggcagaccaactcggagtcaccgagacagtttctggttctatcttcacggtcggagtcgcgtttgggttgtaggcgaaacttttcaaagcgctgacattgcagctacgcgtctgtcgtcggatagggggcgagagggcctgcagcaccttcgccgtgtcttttgaagtgcgagaagtgcgcatgtcgatttaacagcagttgaactctaagacagtcaatagccagtcgaaacggttggaaagtaatttcacgtgagtgtcctcggatgatcgatccatgggccggccagaacctccccaacctcggtgcttacagtgccgaccgactttcccaactccgtgggggcgcacttccatacacatctaatttataccgtctaccatattcgacatgcagtctcaggcctctccttttatggcagcaaagcgactctcgaaagagctggagacttatcaggaggagggagagaatgaaatattcctatacctacgtcccgtcgatgaggctgatctactactctgggaagctgtattgaagggcccagttggaacaccgtacgagggtaagttcacgaagtccagatctcgatctccggtcgggtcattccacgccgtcaatctaatgtggcaacaggtggactttggcaccttactattgaagtcccgccgacctaccctaatgcgccgccgaccgtccaattcacgactaaaatcgtgcacccgaatatcaaattcgacacaggcaaggtctgtttgtcgctcttggatgacgattggagtccgcttgggggtcttgcggccgtagtcaaggctgttcagctgctgttgaccgaaccaaatccggattcgccgatgaatgttgagatttcgatactactgcgcgatggggatgtggctggttatgagagtgttgtccggtacttgactgaggagcagcggtgggtggaagatctggctgttggacggtgacgatggtttcttgaaccagacataccctaccgctctgcacattccgatcatctcatctcgtctcggctaccctgcgcctattatacatacgagtccccgaatcctcacattctgagccacggagttcacttttggcattcctaccatcttgcataccttgcatctacctacatacgaatcgacgaatcaacgagtcaataagctaagagtttaataattgagcacaatttttgcatgatcttcaatttcagagcgaagattaagactgaaagtaatcacatgaagactagcgtgtgctatgcgctgtaaatgttggagaccgctgttaaaacccgagaaacaaaaggtcaaatgcggcggaataatgaatgccagccataaacgcccaagaaaataaggagagacaagagcaggggtcgtcacgggtcatgcagagagatagtacaatgacaattgtcatgaagatgcagagccaatgcgatgtgctgaaaaacgccgttcgaaatgataatgcaagttaggcgagaaggcaaagaattgttcatccattagagggccattgcgaccacgacggcgccaccaaccatggcgacgacctcacgagccatgccggtagccatcgcggcggcattggtttgcagaccgggcttgccgacggtggtagtcgaggtcttgtgggcggccgtcggggtgatgactgtgatagaggtgatggtgctcaggctgccatcgggcaaggtgcttgtgctcttgaaggtggacgtgctcaggctggtctgctcggtggtttgcgcagaggtagttgactgattggtggtggacgaggtggatgaggatgagctggacgaggacgaggacgaggtgctcgtggcagtggacaaagtcgaagggatactggtagtcgactgagtggactcggtagtggtagtcgaggacgccgtagtggcagtggtcggctgagcagtggtggaggttgaggctgtggtagaggtttcagtggagaccgatgcagagctggtggagctggtctcactagtagagctggcgctggtctcagtggtctcactggtggagctagccgtggtactggttggctgagcgctggttgttggctcggcgctagacgagctggtctcactggtcgcaatggctgagctggtctcactagtctcgctggtcgcactggctgagctggtcgtactgggtgcactggtcgcgctggtctcactggtcgcactgggcgtacttgtctcagtcgcactggtctcagcagccgaggtggtggcgggctcagaggtggattcggcgctggctgaagtcacagtagacgccggcagcgtggttgcctccgagctagcagtagcattgtcctggcgcttggccagtctcatcaggctggcaatgacgggttcctcaccttgcagagcttcggcggcatgaaggtcagtctggaagattccatgacggaatttggcggagagagcatgcaaggcatcatggagcgaggctgccttgatgtcggcatcctggagagactcacgttgcgaggtcccctgcactaactctgctgcgaagactgcagacagagcgagcagcgtcacaaagagcaattgaagcaagctgatacgcagcatggtgagtagttgaagatcggccgatctactgataaggtggatgggtaagacgaggaagagagggggagaaagagcaaaagaacaaaggtgagattttagggaaagatgagtggaagaaagcaccaagacccatagtggcgattatatcgatttttcgtatctttcttgattttccgtcgcactagtgaagatacacccgagcatcatcggcgtggctgattttttcaccagtcacacatgtcggatcggccccaaacgaacgcttatacagagccgatgtgaactattttggacgttatactatatttgtactatatttgtgcaggccacgactacagcgcaaaagtaaaaagaggccgttctccactataattggccgggtctcagccctttagggggctaacaatagcaaccgtggaaacaagaatagaagtgttgtcatgcaatatttcctttttactccattgggagatttgagcggcaaaaggggtatgtatttcccctggagctctgattcgagcgtcattagtataatatcaacttgagtcagaacaccctgaactagttcctaactgtacgaataacaatatcggaatcccgtcggatccataacctccccgaccgatcgagaccgatcaagaacaccgaactccatctccatatcaagcgtaacaagcggcgcgtccggcggattcagaattcggttcgtaccgttgagtgcgaaccgatgcccctcgtccttcgcctgccagatactccacgtccgatcgatcatactgtggtgcagcataaaagccgggtcttgtggagacgtgaacagatcttgcagggtggccccgaggctgaaatgcccgccgccgtgcacgcccagcaccccgcccggccgtgcgggccagtagtccatgacggtctggaaatcggaaatattgggcgcggccaggagtcggtcgacgatggtctcgttgtcgtagttgctgctgacgaaattgttcagacttcggttgaaacagtgcgggttgtaatcgaagcctggcgcgggaagtttggttaatgagacgatgttgcggtcgaatgggcccatgtgcacgatcatgtctttgaagggtccgcatcgcacgcagccaccgcccgatcctcggggtatggttattgagccgccggaaaggttttgttcgtcgggattgtgttccccgtcgcccgagagggagctgtcgctgcagtcgaagagcgggctggccttgaggttttccgaccataatggccaattccagtacctggttcgtgttattacaatttggggtcataatgaatgaatgacacttacggcagatatccagagtacccacactcgtctcgcagggctttctcccagagccagaggaagtgacggtgccacgggaggaacagaccactcagatggacattgagtgtgtaattgatatgggtgcttatggtatattagtactcggtctctagcatcgatgaagctggaacctacgccacaaaatcatcgaatcggttccgcacgcctgggtactcctctcttggaagatgctggggcttcccttgcaaacacaataccgcattggtatagtcgatccgctcagctcgctccaactctcccctatgtaatatcagtctcaattggccctgaaaacaccagaaaacacaaaccattccttccgctcagcaatattctgacttccacacaattgctccggcagggagatgtcgatatcgataccgaacagggaggactccgccgaaaccaaagtccccaagacaatgaccaagaaagacggatagaaaccaatcatcctgtcaatcccacaaaaatcccgatctgcgtttaaaattgtcgcaggatctccctgcccggtccatgaacaacactatttataagtaaccccccactatcgagccaataaatcctgctcgtaccccttgtatgatctgtaagtagatggaatatttaagattagcctctttcaatgaactgcaaaaatacttggctatgcggttccaggcctgtcagtgttgtgagctgtcactcggggccaatgtgcctacatcatacatgccccataagtggcgatgcacatcttcccctgcatgaaatgaagcgataggggctctagtcgttcactgcagaccctccccaaaacctagccagctcgctccaagccaattatcttacttgtttatgagatgctttatcgtcagatctatgttgtacctaggcgaactgtcagaatttggtgtgcatacttggcccccgtattctagcggtggggaagagagtgttctagtcggattttaaattagctgcgtttgttgttacgtgctggattatttctaacagaagaagtgcattgtttaacgaaataacaggtatagagaggaatggaaaggaaaggaatcgacagggccgtaagggagtttgtggggtccttctaagtaaacgatataaaactcgaacgctcgcttacattcccttacgcatcgggaaggtaggtttgtccactggacgtactagatatgacctactagacgctagatcgtggtataacccccgggcaaaagtatatttagtccctgaatgctagcttctcgttatccatatagtcgtctaattgtaagacccttaggtgcagttgcctaagtatacttagggataatggtggatcgggaaatagagatagaatatagggtggttgtatgtgaactaatagctgcctctccagagaagcagcctatggggataataccgcaccgacggaatcaactccaaagtatctatacggacgaccaagttgattggaaatcaacttggctcaaataacaactcatttcatacctctgaattacaaccggtctgtcgggcgaatcgccattccgaaattggtcagaatccaactggcgcctccctaacatcagtagtccgtggacccgtttcactaaacgaaaaccaaagccttgttgtggaaaaggttatgtgtgacatccttggctgtactagtaatcctcatgactcttctatgtggaaacagggtctgttttatgtaggtgaatgtggggtgggaaaaggccatatcattagagcgattatcgcagcgacggtcctggttcaccgtaaggaataagtcatccttatggcgcccacatgagcagtttctgatgccattgatggtagcacgtatcatgcctcactcggaattttgctcaaccgatacagacgtgatggggttagtccccgagttcgcagactatgggctcggaagacagtcatgatcacagacgcgatcagcatggtcgacctggccgcattgtctacacactgcaagactgttcgatccctggctagatcatcaaccgatcttgttgcaggactgccctgggatcgattttacggggtgatctacgatgagcagatgcgccaggaccaggacgtatcatacagagatttgctacggaggtccggtacgctgacgtgcgacgacttggcaacgcccaattcaaaggccatttcttcgctctccgatccacaattctaaacatcaccggccatcgtcaaattgaattcgttgcggcatgtcatataaacgtcagaaaatcttcgtttttccagccctccacactcgaacaaaatcctcaggcccgaccgcccttcatctgcgagctgatgacttgcttggtttgcttaaggcgctaaggtcccatttcctgggtctattatatacactgcttccatgcctgatgttgatgtgccaaaagcggattggccggttcataagggaaaggtgggggatgtttgatgccaatatgacttatattgaatacaactggctaccaagttatcttgtgggctggtctttcactagagtccactctactggcctccgtcgctatacaccacattatctcgcggatttcttgaacctcttctcgatttttaccggtctcttaaatattcggtggcaataagacagctctagatttgaaagcctgccatttgcggctcattgcagcttttaccgatgatgtaatagctatcatcgtttcaagtaagtgatgaaccaatcttagccatgcaatggtagcgacacccactccaataatctggggatctgggaatctggggaaacatccatggctaagcaatctcgcatgttcggaaatgggttttatcctatacgaagtataatattgaacaccgttctcacaattgaatccatcacgatggaatgttccagccgcatcatcatgtcatatattgtgttcctccatacttctctcaaatcaagagaaaaaccaaagtaattctaccaaggaataccataggtagcgcgatgtcacgagcgaaaaaattgaatatatattcgtcaatccatcttctagccgtcctcgataggaattgagtaaaattgaacatctcccatcaattacacttcaaaaaatgttctttcaaagatcctcactacttgcgttcatttcactgtatctgggcttcattccaaggaccgccggtcaagtgcaggccaattgcctaagtcaacagatcttgaataatgatttgaataattgtatatgtgcggggggcaacaatgaatgccagaaacagtgtccagttggacctgttgcgccagttatgccagctccaaactgtgggagccatctactcggacacctgcacttggatgactgtgaacaccattgcttgacagaatcaaatgacttctgtaaatcctgttggatctggaacctacctctctgtctttgcttgcagaatggtggatgtctgcaaagctccaaaaacgcaccttactgggtcaaaatcacctcgacactagcgaccacgaatttagcaatcccggacattttgaacctgcaagaaaatcacaaactcctggctggatacgggtgggattttgggcaggagacggcatccgacccaaaaaccgagtcgctagttatcaactcagcctactcgatcacggagaatcaaattcacatgcacgtttgtaacattaataccaagatgcgcgactggttggctaccctctatcaatcctccccttcagcctatcaaacactggttgaaattccaccaccatatcctgctggagagaaaatgttctgccgcgcgtcgcaaaccgctgatcagactatcccgggggattcgatctccgatgatatcaactcagtcattcagcagcagcctgtttgcaagtactttgtgggtgcggccgtgatcagagattcgaagcactatacctgggtatgtgtgacggccgatcatcttagtgcggaatatggaagattctgtgcctgattttgctggaggcatctgtcaattgtcggagtatacggaccgacataccggaggattgtaatttagtttatgtagttaatcatggccccgtataaattgtgctaggcggccaatacagatatttttacacatacagcccagctgacagttatgagcccggttcgcactggacgagactagtattgattggtgtagtatctagcaccagctagaagtatctcgcgaagccgcaagccatacgaagctatatatatagctacccctatcgtctagtaatagactcggtatcgatcctctccgccataaaggaaaaactgaaggacgtacctcaatagcgtatctagttcgctaaagtataattgtatgtaacgcagaagaacgtctaggagctatgcaacctagacaccccgtcaatagatatcaaccacttcactttagcgaagaaactccggctttgttctagatagttgaggatttttgtgggtgacctggatatcttggggtcattgagggaactcgattgcgtattttcatattgggtttcgacgactgagtatgaaactctatgccaagcttgggttgatctcttgttttatagtgttgggtcgctcttgccttcccggctttatagctccttcctctctcagtctctcactctgcttttttgttttgtgtcgtgaaaccttgtcgtgtgcccttgatctaggtagtctagtatgtgagcgtgcgttatagataagccagctttaagcttttctttagacatgggatagagtagaaccactgcgaggaaaatggtctgcggaaccaacgaggaagatacatggagagcgtcatgaatacatatttaatattgacccaggtcctgcgaattcttgggcgaagcccttatgcacaaaacactaccatatgcacaaaacactaccatgatgctccgaaggctttttggaacaggtcataccccaagccatagcttcctgggctcacatcattgccaagtatcgcctcggaaaattgagtttgtgggtagacttcttgcttaggtcctgcccttctggctcttttcttacagccactgaatcctgcatatacccattctctacatcccatccataagaaacatcagttcccattgtgctggctattcagttcgcccatcaattgagcactctaatacattgcctatctctctgccgccgaagttggtatgaagccacttgtgactttctgggtgttcttggcttatgagcttgtgaattgaatacggcgacggttctcagtgggtatgatttcttttgccgcaagctggtcttggacgcgtcgcctgtgtcaagctctgttattattgggtcgggtagaaatgaatctggggatctcaaggccaatggtgaaccgtggatttgtcttgtgtacggggttgtggtcttgcgatggcccgagggatgttccatggttgttgcagcttggcaaggcggtgaacggggacagaataattacggtcgcagattctctcagctagcgagtttcaggtccaacccacttgaaatattctagaagctcacccttacgcaactgggaggtatggcgtcgggtctgggttgagtgttgacagctgaaaatggcaagaataccgaattaatgagacgatctgagctaaatatggccatatactcctgagatttgtcgtgatttgtcgatctggttgaggtcatgttagtacaatacacgatgtacagaaacaaggtgatgcgttgtacagggtaagagaaatagcatgtcatttgatatacggaatacgagtctggcattgttcaagcgagtgtctcaggtctatgtatagactgtttgaggcgagtggtcataccttggcttggtggcgtcgagacagacggttttagcgagtaaacaagtaaacagtcggattaatttgtgattggagtattctagaatccgagcgcgtttgatgttgacccctatgtagtttgacccccttagacccttttaatgacaatagcgttggaccccagacccctgaagagatcgacttgcctagatggagatgcgtcatgccaagctagggttatccaccaggatatatagtcggggtactactagtgagggtatgttgtgtaaatgggtatacgcgtctatataggagcattgataaatatagtcatacatacatgccagttcattgtctataatgttgtactcgtaagttggataggacctgacgatccaagaaacaaataaatagataatataaatgaaatatatcgaattggccaatcaaagccatgaatcgagggtcatccccactgttaatccaccgtcgacccttgctgatcggaacaaaacagcgaggatgtgcataggaccttggcatagcacagcccacgggtcttggcccaaaaccctttatcccttgctcttgctgtcttctcttctccttcctttcagatttcgtttctcagtctgtcattcactctcttttaatccgagcgcatctttctcccactctcgtttatccaatcgctcttttatttattctcacattatgaagtccacagtagcttccatggccacggccatcaccttgggtgcctcgaccgtccttggtgccgcaaccaacctccaggcccgtagcagtgatatcactccgatcactgtcaagggtaacgccttcttcaagggcagcgaccggttctacatgcgcggtgtcgactaccagcccggtggttcttccaacctgaccgatcctatcgctgatgccgatgggtgcaagcgtgacatcaagtacttcaaggaattgggcctgaacactatccgtgtctactccgtcgataattctcaggaccacgacgagtgcatgactgccctcgctgatgccggcatctacctcgttctcgatgtcaacacccccaagtactccatcaaccgtgccgagcctgagatgtcctacaacgatgtctatcttcagtacatcttcgccaccatcgagatgttcgccaagtacgacaacaccttggccttcttctctggtaacgaggtcatcaacgacggtccctcctccaaggctgctccctacgtcaaggctgtcacccgtgatatgcgcacttacctccgctctcgcaagctccgctccgtccctgtcggatactccgccgccgatgtcgacaccaaccgtctcgagatggccgagtacatgaactgcggtaccgatgacgagcgcagtgacttcttcgccttcaacgactactcctggtgtgacccctcttccttcaccacctccggctgggaccagaaggtgaagaacttcactggctacggacttcccctcttcctttccgagtacggctgcaacatcaacacccgcaagttcgaggaggtcaagtctctctactccaccgagatgactccggtctactctggcggtctggtctacgagtacaccgaggcgggcaacaagtacggcttggttactgtctctggtgactccgttactaccaactccgattacaaggctctcaagactgccttcgatggcaccaagaaccccactggcaacggcggctacaactccaccggtggtgcctccggttgccctaagatgcagaagcctaactgggacgtcgacactgatgctctccctgccatgccctcccctgccaagaagtacctgaccgcaggtgccggcaagggcgatggattcgccggcaagggcagccagaactccggcaccaagtccaccaccactgccacccagggctccggtgacgtcgctgctgccactagcggttccactacttctgctactagcaccagctccactggtgctgcccccagcctcaagcctttccagttcagcttcgcccccgctaccgtcggcctagtcactgtcgtgtcggctgtctttggcgctagcttcatccttctgtaatgctcctacctttatgaaggggcttcatacttttttcgattctccctgacttgtatcttttttaactggctttcatcttttaccccgtgatgatcatcgcttgggcttggcaaattggaggacggcgggttgctttccagttggtttattcagcccttggtatctagtgttcaatgaaacagagcttaactgctcatatattatcttgctagtaactgcgctagcaggaaatctcactaaaccgtaattccaatcaaacaccctcagcaagagcttgtctccgcgacttcgacagtggatcaaaatacgggatctctccaagcgaaacgacccgattaccctggcgcttcccattgtagtcactgtcctgtattagcatttcaactctgaccatataaaccaaagcagaaatagtcctactcacttggtagcagtatgataaaccgaccgactaaacacaccaacgtcagcatatcacccatcttcttcatgaagtaaatatcatacttatcccaaatagcaagatcattcctcccccatctaaaccgaacctgcaaatcatgattctcaaacagaagtcggttgactatatatcccaacgacacatattagcgaagtatccctcagcctgtatctagtcgaacttacacagtttcttcaagacctcgctctcgagctgcgtcacaccctcaatccagccatgctcgacctgctgtcccgcgccgaaaagactcttccagcctgtaaccgggttcgttcggatgagggggctgtttgtgttcaatgagttagtttttgcatgatcagtcttgggtgacggtcagaagataggcgagtagtgtcttactgcgtcgctttgaaatcaaaccctgtattctccggtgcgcccctatcaccttcgattaggtctatgccgtgttctttggcgattttgttgaatgcaggctgttttgttatcagtacatatacttaattgttgcacattttatccggtgaatgcagcgagtgagtgagtgcgggttacttggttacgtacctggtaatgcacgaccttcaactcttccgctaacttctggatacttggcgagagtcgatcgtacagctcataccccgatgcccagagggtatcgccgccggactggtcttcggggaggtctgttatctttagcagagcgtagtcggatgggactcgttcgaatgttatgcttggatgatttttagcttatttccgcgttatgggtttgggttcagcactgcgttcagcactggggagtgagtaggagggaagcatactctgcgtgccatccttggcttgcgaggcggccgttcagtggcttgtatctgtcgccgtatagtttgcggttgacctacggctgtcagatatagtgctttatgctgctaggtattcggaggggaagttacctcggaagaaatgacggaaatctcatcgtccaggtgaccattctcgtcgactgcgattcctcgcttgctatttgcgacggcgtggcggtggagctgtacataagcatatgtttttcaatagttgactagatctattgcgtgggatctgctcacctttgatgtactcggcttcccagttaactcgcccagcttctgaccgagaaccttttgctcctcggaggagatatcctggtcgcggaagaacacaacgccccgttcggagactatgtggtgttagtgtttggttcatttggtggatctttgttcagtataaaatatactataatagactcaccaaggatagccaaatcccggatcttcgcctcgtctttcagaatatcggtgagttgcacacgtgggaactcagtcccgataatgggtgtcgtgttgaagttctcgtactcatttaagcttcctgatgacttgagtggtgagcgaagaatactgggttgcggggtatcggtggccttggctttgatatctagatcctcggcgtggtcttgggtagtgattgctggcgacattgtgatgcgtgtgagtggtatatcgtgtattgatccaaaatgaattacgtcgtctattgttgaggagtattatgtgcggtttgacaagtatatctctcctcgtaagtcgtaagaaggttcgtctatgccgggctgtgatcttgcaccatcgcctctaaagtttcatcttcgaggcacggattggcctgtcttgtgatgacgacacagtgcttacagtttggacattgttttggtgggatggtgtcatctctatctcatgaagttggtcaattgagggttctccgtgtacatgtagcaatctgtgccgtatatggcgtataagagggtgatgaggagtaccaattgcaaaatcaggatttcatcgtataattactattgataggcttaacaatacgagttgttctgcgaattcggaggttacagacacatcgatagtccatattttgttctataaaaatataaataccgctctagctaagatattacctgtacaaactcgttgtatattcaatgcaatgcttagtcgaatgaataaacaaagcaaggatctgtgtaagtcaaggagtcattagggaatccatcagcccaacccaccgaaatcaagctgcttatgcagccgaggcaggaggagcaccagccggaacaatcggctcaatatcaaaccgcatatgcaggtcacgtctcaaaaaccaagtatggattctagtaatccgatgcgtacctataggccaagcccctagaacaagacaagccaccgccttgcccagctgcgttcccaggatctgctggacttcaggagtattcatatcccaagcatggattgttggtgtcataccccttgtctcaggaccgggaagaccgttatttgggtagagcaccttccccactaagggaagggtctcatcattctcaacttccaccatgaaaacataccggagagtatcaatcgcggcgtcctgtttgtataaagctagcgcaacatcagaccatcgtggtccccactccattctaaaaatcgaggtggcaatgatagcacccttgacgatgcaatggtcgtaagaggacacatggtgtacttgttcatttctcgcattgcgctgtagagatgattggcggtatttcttcaatctcggattatttggaaggtaggtggatttaagactctctctgatctcgaccggtgggacaacgaacgaggattcccatacactgaataatggctcgtccgggggattggcttcgactagatcggcgacggttagtgtagactgggtcactgggcatgctgggccagctgggttggtgttggccatccaggcttcatattgagcacccgttgttcgatacttgtcgattttcgccatttcgggcgttggttgtaatatgtagatttggtctgggtttatattcgcggaaatattacccatgtacatgctaatattcccgggacttgtaggtaactcaggaaggcctgccctgagatcttgctcggcggtgttcactggtaacggattaagatgtgtcgatatgccctgtgattccctggtctttagcttggatcgaacttgtgcgagttttgattgcataggggagctacgttcggccggagccagtctgtcattatcgccgtcgtcaccgtcgtcgtcacgtttccgctttttgtcctcagaggtgtcggcttcagtagacgcggtggcacccgctccaccttctggtactggcggtggtgcttcatcatcatttccaccgtcggtgttattacgacggaagaaattagcgactttcttgaatggcgaagagtgaaattcggacatcgtgttgaaaatgtcaaaatcagaaggatttggaagtcttcgggtttctgatcttgttagccaggagctgatatgcttgactggcttagctagatgctggactaagcaggtattatatagttcgaaacaaaaggtcattctaagagatgtcgagtcagtgtttacatccagtctatgttaagatgaaacagacggaacaatgaaaaagatctggagacaagaaggcttacacaagtgacttgataaagaacaaagagagccgagacagagcatgtgaatcaaatagatgggatatgaagtcctcgagtgtaagcgtatgatgcaatgagaatcacattatgcaaacaaagcagtgtctggtatgctaaatttagcttgaagccacgagtccttcaacgtgaaagaactcgatccgccaagttcaagtcctgaaatgaacatgttgagagtgatttcaatctcccaggaagcataaaacgtcacgaactcgcatgtatagattcatgataatatccaaaagtagatcagttgatggaggtattgagaaaatgaaagtccaaaagaattgactgatatctcgttagccctgaaggacttcacgtagtcacacatacaattaactgttagcaccccatcctgcagaaaatctccaatcccgcccagcctctccgatccctctcaccagacctacaacattatcaacaaacccagcttcaccgcgattgaccctctcccgacgctcggtctcggtatccgaactcgcagcacgaagattaatcagctgctgcgtactatatccctgcaagcgatccgcatccatcctcgttaaaatactaccgtccccacgccgctgggtccacgccgcctgcttaacagctggggcccagtactccgccagggtagattcatcgcgaccaaacgcgtagcacttggccagcggagagtcagaatcctctggtataagcgacgcattccagcgcgtgtggacgacttcatatctcttctccatgaagaagataaccggccaggtaataatccagagctggagaagcacgacaacccaccagacgaaacggtttgtgcggaggcggttgatccagtgcggggagtatattgtgacggagcgtcggctgatggagagaccgaagcttagggagccgcggtagttgagttcacggatgtgggaggagaggacgttctgcatggcgttggagtcgaagccggagacttcgcggtgcagtgtgaatctgtatagggaatcgagattagcagtgtattttgtgcgagtaggagcagagcatacgatttcacagaagcggggtcactgcagaagcgctcgcaccacatctgtaggtttctcgcatctggagagctgttgttctgctcgtcggcgttatctcggcctaggagggcatcgctgtccccggtgagactgatagcggcacgcgacttgggcggcttgtacgtgcgcgagcgcaggattcctccccgatacgccggtctgagatcctcatcgctgaggacttccacttctctccagtttgtgaccatgtatccgccctcccacccggtcagcatggtctcggccagatccagtctgaactggaagtctgtgactgtgttgcttttctctttcttttggtcattgctcgtttcggtgtgggtgccatggatggagagtagcggccgtggtggcagctttatttgtagacggaggacattgtacaactcatcgctgttgctcgagagcgctggttcgaggctgagcgagtccttgccgccggggagataataggccgagtcgattagccggagcggtcggatgctttgggggggctgtacaggctggacaggctgaaaatgttggacaggctggaccggggcgacaatgagttcggggtcatcggtatacggaggcggcgcgtcgtcgtccagagaatggagtgagtgcgacgatgacgcgtgttgaagacgacccatcacttcggtatttagagcgaagtaatcaaattaatgaaaatgatcaaagggaaaaatattttagagagaaaagaaagtaaaattgagaaagagaggggttttcaatgttagaggctctaagacctcgtattacacagcccagcaccagttgactgcctattctatttataccacctttcacctttcacttcatccaacataacacttgaaagatacaaatttcgggtccatctgttggcgatcatggcacaaaccaggacccctccagccataagtttgggaaatgtcgctgacaagatcgcacgtcggattaggagagacggtacagagaccattcgacatacgccatgatttgggactattcagagcatcgctgtgacagtcccgccactcccatttaccgttttgtagagtccaccagcgacatgaaacggctgtgttgttgaccacggtcgctaagttgctcgccgcgcggaacttcatgcagtcactatcctccaatttcttgttgtgaccttggaccaacacgtagctgccagtgcaaccaatcccatcgaacatcttcagtgaccatccgttggatacggtgacgataccattcacggtttgtgtggagacaggaacggttgtggttgtggaagtcttagttgtggaggttttggttcttgtagacttagtagacgtagccttggtagtacttgagcttgtggcggctatagaatcccgcatcttgctcgccacaatactgagctcattggctaccatatagagaccagcagtgccagtaacagtgacaacagaagccctagtagtagtgctagtaggagcggcagctgacatggatgtggtctcatgtagatatgtcaagggtacatctaccaagggtatatctgtcgtgaaaaaatatggatccttgttggaagttgtcgaggatacatctttaactgtcaatgatagagctttggtcgcaggtgcagctttagtctcagatgattttgacgtagctttagttgtagatgttttcacggatgtagcttcagttgcggatttagttttggttgtagttttcactgtagtcttcactgatgctgctttagcttcagatgtagttgatatggctttagttgcaggcacaggtggtaaggcagccgcagatacagatgagacacagaagtctgcaccggtaccacatttaccccttgtagaacactatagatatagtcagtctaggctgcgagatcaaatccgatattggtaaagctcacacattgaccggcaggacatggattcaaatagggaatgtcggtccacaacaacggacgttctgttccgggcacttggggaccacagactgcatcaccaattgcaactggcattgggggctcgccggcgctgagacaaacctggcctccctgctgcagatttttgcatccgtaccatgccgaggtatgggtgttccaagtctcgatattggcagtggtgatactgtacccctcggcaatcttcgtgcaggtatcgccagtgcggatagtataaacgtagcagtaagaaccactgttcggtggaaagagagtttctccgtccccacagcatacgggtttcccgtgagacaaagaggagcaaacagtagtcgggttgaaggaagtgaatgatgctaccgagatactacacttggcagccagattgtcgcatgtatctccagtttcgacaagaatagagcgacatgtgtagggatagtaaacggaccggtcttggatcactttgtactatcttgggttagaatctggggtacaggatgtggagttgaagaagtaggcactaacctcgggtacagctacagacaacgcaactatttcatgaatcagaagaagactgcatagagcgagaaagatccctttttgaaaataccccatcttgtgtagacttgcctgagaggacgactctgaggaacacatcgcgcagctatatatatatctataaagaactacaccacaaatgtcacgcctgaaagcaacatcgcggaggtaacgtgcattgatgcagccagtgaataatatgaaacacagatatgcttcatacagtaaggcgcaggggccaagagtccccgaagggccacttgaaatcactcattctggaggacaccatgttgaattgttgtaaagaacaatctaaagtgcctcctccgccaccgtcaacaaagaaggtcgttgcatccgatgagcccccggtaaaaatgtgacctcaaatagcctttgttcaaatccttctctttcctcttcggagtttggatagcagattctctttgaagaagcgatataacttaccatactgccaagagtcttggctaccagggtaatagatgcatcaaaaccaccagtttgtgggagttaatgacaacaaaacaaaggaaagactaaaagagagacagatagatgttacgacactttatatctcctttctcaatcagcctcaattctttttgctgtgggacaaaccatcaaaacgatagcgctcatccctgggaccagttcaacgccgtatatatattggatgaacatggttattagcgaggattcaaaagctgagtgccattatagtgcgtgtgaccgagtcatagaacgaatatccaggggttggaataacaagactggctaagggcttatcgtctttgtgccactcgtctttgtgccacaattcaagggttagggacagggtttcagaaatagcttcttagaattgagacatcctaactgggtagcattggaaatctggagatacccaagatggcgttttgggagtgatatagatattctccagagctattcctcattcaaaggctaactcttgacacgcccatacatcgacgtgcgaccagcagagatgggagtatatggctaggagcaaatctagacttccagatacagcatgtttgtcttagggtgacggaagtgagctcaactaaatattgcttgaagcccaaaaggacctcggcggttgatgcatatggatcctctaagataattctatctgtattcagacttgattccttttatagactcttgttagcttctttcttttaaatacctcttagccatcgagaaaatatgcactctctaggcgtggtttatataaaactcctaagcaataaatacttagagagacatgtacggcttagtgatgaattcaggtatgctctgatgtattgaatgtcttcatgcagtttggcaaacctctctttgcttgctgttttggcacctaagagctttgtgtctttgtactcacgaagctattaagaaagctcatggcagtgtctagatgatcatcaacattttatctcacatcattctctcctcttcagaaatgtagacagtatacgtgcatcacgtagaaaatgtatgtttaggaacagttgaatacacctggattgcagcgtctgacctatagcgcttcaaccaaacagatatctgcttcatgaacacactactcgatgcatccgagattgagcacactgatactgtagccccatgccctaagacaagctctagaagtgcaattatcagagcattcttattgaagcaaagtgccttgagcttcgacgacatcataggtatacacctaggcatataacctcattcctcgttttgttaatcatcgcgttaaacgtttaacgcgtttggttcctacttattttgatttcttttttcccctgcacctctccttgttcaatcttcacgtatctatttcccagctttgtatcattcatcctctgcttcatcaccacaatggcttctagccagaatgtcgctaacctggatgtcgctcacccggacgtcgctcacccggacgtcgctcagccagaagtcgatcatctaggcgtcgctcagcaggatgtagcgcacgaggacatctctcaccaggacgtcgctaagcatgtcgctcaccagagtgttgctcgccaggatgcctctgcctttaatcaggctccttttaaccaggctgcgtggcttactaccaaatcaggccgtcccctcaagatcggcatcgcgccattcacacctccgtctgcccatcaaatcattgtcaagaatggtgctgtggctgtcaataccgttgaatggaccaagaagttgatgggcaacatgatgtccccctgggtcaggtacccgtttgtactcggaaatgattgcgctggtgaagttgtgcaggtcggtgacatggtcagtcgcatcaaggttggtgatcgggttcttgcccacgccctctccatggatccagctgtcaacaaatcttctgaaggtgcttttcaaatctacactgtgatccgtgacaatatggtcacagtgattcccgattggctctcttatgaagaggcttgtgtcattcccctcggtctgtcaactgccgccaccgctttgtttcaccgagacttcctatctctcaatctccctggtactcccccgggcactggcccagaatggcttcccgaagtggtcctggtctggggtggatcgaccagcgtcggttgcagcgccatccagctcgccgccgcggctggttacgaggttatcgccacttgctctcccaaaaactttgaatatgtcagtaatcttggcgcatgtgcggtctttgattatcgtgacaaggccaccatccagcaaatagttgagcttctcgagaacaagaaagttgtcggcgccatcgctgttggggacgactcaactgatgcttgcattgaagtcctcgcgaagacaaacggctcgaagttcgtggcccgggcctgcttcccgcccccgaaaagaattataagcacaaccttccagctattccgtgccgtggcagcctcggttcggtcgaacatcaagaccttcatcaaggcgaaacgcagtggtgtgaaaaccaagtttatctccggtacctctgcggctcataacgaggttggtgctatggtttatgaccacttcctccctggagctcttgccactggggtttttgttgctgctcccaagccgcgcattgtggggaaggggttgagccaaatccagcttgctatggattgccacatgaggggtgaggcagctcagaaggccgttgtctcgctttgaatttgtcgcgagccaatttcgggtgttgttcttgtttgctctcgcctgaaagggcactgcaggacctaggagactaggtattcaatagttgatgaaatcccaattcaatctaaacacaaagtgagtaaacttaaagatcaaggtcatatttgtagtgagaggaatatattctcaggagtacccgccttctgatcgatatgtaatatgaatggtacttgattcaaggacaccgcctacttgaatactacaatattacatctgtacgcatacaagattgaagaagataattgaaaacagaagtatccaaacgcctgcgagctctcgatatggcgagctaaaaaagattcatgtccaagaagaaaggtggctccggctggcctgtgacttcagacatagtacacccttgaacagtcgacaggttgcacaatttgtgaaacgagtcatagtccgagtcgagcagctccaagtaggtcgtagctaaattattcccaccctgcaaaactcgcaaagctttcttcaaatcctccaacttctgctgtttatcctccgacgcggagacacatgtactcggtcgatcggcatgtgtcttgaggaactttgccgagagatatagtagcatgggagaaaacgcatgcgcctgtacaaccttgtcagacacgaaagccactgtcaattcacggggagcaaagggagtggtctcactttgaaaaagctggatcgggtgagcggcttcgccaaacctactatctcatacgcggagtagagaggaaccaggatgatctcatcatcaatttccaccggcagggcctctattatattgtagaaccatatcacggcggcattggcgagcatatttgtgaagaggcgcatggggtcgtggagttcgggcgaggacgggggtagtgaaatcagcatcagccgctgctgtaccatttggtatagtcgagtatggtgtttccagctatctccatggcttggagacgtcttatcaccgtgcgcggctcgctggaatgcaacgctgtgccagcatagtgtgatcaggacgattgtctccgcgaaaggcggtagcattttgtgtccggaggcctcgatctcgtcatataaggagtccataatgactggcctgctgtgctggaagtctgactccgagacggggagatatatgcatagctggagatgttagtgtcactcagagcattctgtaaaaaggagtaattgctcactgcttcgtcatttagacttagaggccactcgtcagagatattgaggaaccggtcgagacaatatgctagccagaaggtccgtcgcttttcctcggcctcggcccaggcttcggggtgtgccatgtttatgctaatgttattgagacgatcaatctcgtgcaattttgcgagttggataatgcgaaaggcacgtcctgcagtaagccaggctcgacgatagctcatatagcgaaactcatagtgggtcagaagaagccatgcttgggctgcctgaagacaggccgcacctctagattcaatatcgtgatcaagggtctcaataccggaccgcgcacggctgtagagagactctcgcatgtgctgtaaatgggcagatgacgcagctgcaagtgcccacattgcaaattgcaagcagatgtgagaagctggtttgttgaatctctgtgaccaggagaagtaccggccctggtggagcattggcgcgacagggtgtactctgtcgaaatatagttgatcccttcactagctgttagaaatatccggacttgaagggtaagctttgcgtacagatctgcctcgattatatctgagctctcatggtcaggtggggtcattggtgtaataggtgaggttattgtcgatgtctcaatggagtagataatgtcacgacattcgtcttttgtggcattggggatatagtcctggggtgggctgagcatttgaattgtctcgtcggagtgatatttctcactgccatccaatacttcgttgggacagagattgccctgatcacaatttatgatgctttccagtgtagctaacgataaattagcagggaaggtgtataggtcacatttcaacacaccaatgcgattgcgcaaggccttcaaatgtcccttcttggggccccgtggggagcgaacctgattcacaaggcaggccgtaccagaatcctcgcactggtcacattgaggccgtcgtctattgcatcgaagtttctttttgcggcattcctcacaagcctaagttgtcagcgccaagagtcaccttatgagctaagtggctattgtctcaccagtccaggctgctgtcgtgagcctgacatattgaggagctgaatagagtgttgatgttctgatgttctgatactactgcgcctccagtaagaataagactacccgagtcaataacacaagtatatgtagtggatatttataactgtcaactaagactattgagtgcactccagcctgagtcgctcaagcgtcggcaattatagattaactatttgtttcgccagataccctcccctgtagaaagcttctttcacgatcttccaaatttggcaacttgtacttgtcgaaagtctactcctcttccccgatgaagtccgaagagaactcctacgtatggtgtgatcagcgctacatccgaaatggccccatactcatgacctcacgtctttcagctaatcaagatagtgcctgtcaagggtaaatggctaatgatctagatagctttgaataaacttccgtgcctgcgctgggtgcagcgttagtatttttatcacgccgcttgggtagcatagataagctggatggtggtagtaagtatcaaccagttaaccatgtttgtcgattgttgatcagaggttgaatgatctgtcatcctggtgttaggtctgttagccgaatcggttagttgctcaagattgaggttcggattgttaatctagtgtggcaggttgtgtggatatgccacgccgactggctgttacatatctcaaccgcggcacatgcagcacgtggacaatgatttggaattgataattcaaatcacgcctactacgcaacaagctggactagaggtaaagctggttctcggcctatttgagccaagagagtgtagcacgaaacagttgtgaaatgtacggggcattgattgtgtcattggctcgttcagaatatcttcttcaatctctgacgcaaaggtagtatggtatctagagtgtttggcggtttggatgtatctttcatggttgagataaggtcttggatgcaggtttccgtaataatctcattgactattggacagatataaagatcaattgacatgatgagaatctcggcccatgactgcctaagcgtatcagaaaatggcttgggttacagctagatcaggtagggctgaatatccggaaatctcacatcttgatctgctcctccgcgacgtgataacttgaacctgatcgaaagggtctcttgcagcaattctgatggaacctagtacttttccctcgcggctatggaaatagattgttgcgaccgagaacgtcaacacaccgtaacttcaagaaaaaagcttggatgtgacttaacctggtcgagtgatcatggtagcaataaatagatgcgcatggtacgcctttgccccacattataagttaactctctctcttattggtgaatattcccctgtgagagccacgcgaggctatcgcatacaccggggctacactaaccaaatacggtaggtacagcgtagatatactatcatctcattgtaatagttgattgctaattgatttctaaactaccatttgctcgggggaattaagcacaaaggcaatcaagccaagggttgtggcagcatccgctatctggacctgcgtcatcctactgccacctctaggactacgcggggcttatctcgtgcacttcagctcgttccggcacctattcacggcagtagatattgtgagattctagtgttgataggttctctatcgcctcgggccgaaaaggggttgtacgtatttggaattgttaaacggttatagtccttgaaccccatgtgacctgcggcgcgcggctctgctccccattgtgtacctcggcagtgatatggtgcttactcatcggtcattgttggaatctcgactagccagattcggtttctgcaggatctgtcgatatgcaatgtcgcagtagggtgtggctcggccaccccgttgcagcctcgagttcgggctaacggaatgtcccaggcggaacagaattgcattagatctcacaaattctaggcgtaaaatgcttcgtagcacgtgtgcctcgaaacccacgaacgaacacagtcatatcacgcttgatccagacggcaatagattctgtttatacagctgttcaaaatttcaatcccatccttaggcacaaaatgtggagtctaaacttgcccatactgggggcggataagaattcagataacctccgatgatcaacggttctagcctgttagcgtcgggacgggccggactgtgggtaagtccgcggagttaccaaactggaacggggtactccggtttccgtaccgagctgtataagctttccataatacaaggcgaaaacgggtaactctattactactatatctcaaacaggcaagaagggactggcaggaaggaactggcaaggcactgccccaaggcaagagcattcctgggttcctgtctgaggaaggaacgatattgaagaacatctaaatcaatcgccaccaataaaacagcatggttggtcgcgcgccgggcgctaatccctgatatggctccagcaccaaaaaacgccacgatctagtactagttcatggtccaccctagtggcttcaaccttatcgagcaattttatacctgggtcgcttcatactgattaatctatgactggtaagatcgaaataatttctcggcctcagttatctattgtccttactactctcggcgttacttctaagggtatgaaatcatgccatattatttgtcttagtcaattaggaacacaagagtcgtatatgggctccttgggctattgcgtgtccaatgcccgagttagattttcaggccgttgccggaatcccaatggttttgcaacagcctatctttctgcgcgactctgttaggatctacaagggacaatccggtttgattcaagtggcgagtggcggcgttggacagacataaattatttggcctcaacttttcggggttgcctttgatcaagctgcaacaatccggggcaatagcgcctgtgtgaatttccaaagaacccctccattgtgagagatcaatgcagcgccggtgtaccaagtgctacgttttccctgcaacgcatacaggtcattgtagaaaccgtcgcggatagcctgagccgacacacttagcttgaatggcgtgtgagagttgagattgatgatttggggagttgtaatcgtaacgttctgtgcttcctgcaggttctgaatggctcgaatagtcgcttgctcgactgccaaccgcgtcatatgtgacgggctgcggtaccagacgtagaacactcccggaatgcggatgcttgtaatttgggaagctccaggttgctgaggaatatggtacgttgcagatgagttgttctcattgatccactggtacccttcgggcaaaccagtgttattgggtagtagggtatagtagcccatataggttcactgcgagaacatctgaagctcctgtagattgaaattgaatggcctcatattttctaaagttgggggaatgttgactaaaagcttagatgcttggacgagcttgaatcccgtggtcgtcttgacgacgagtgagacgcctcgccctgtttgtggtcttgcagcagctgtaacggttgaggagatgagagcatctgaacccagctcagcaagagacttgacatatagctcagagttgtttttatctgcggcgttgagcctagcacctgctatttctctcaagtatgcagcgtccaccatcttcatcacgttgactgttaactgctgtagtggatttgaaattccctgggagctgaaataaatattaaaagcagcatccgagatgttatatttgacaaggaagtcccccaatggtaggagcaggtctggaggaacaggctgagggatttcccaggtagagtccagccaagggtactgcgcgacctgaatggcccatccggtcaggtttcgactggggttgaatagcacagggtttcctgtattaaaatctgtcagcgagatagtggcattagattcggtatatttgacaagggagatgttgaagtgggcaaaatagtcaagcgcgatagagctgttcaggaacgattgcaccccatagtccacagtgagaccggtagctttatcagtgtaggtgtttgtgtggccacccaggtgcttctttctttccacaaccactacgctctggcccatcttgcgcaggttgatagcggcatatgttcccgaggatccccctccaaccacggcaacatcgcagactaggacatctgctttggcataatttttgggatcgaatgtattgccggtgattgccacggctagccaaaatgtgaccacggaaggaagtcttgacagaaacatgattcgggagacagcttgatgtattcggttgaggttttgttttaatcccttggtatttgaacacttatggcgcgatatgtgttaacacacagccctttcaattcatatttctaccgccaggaggtgttagtcagtaaatgcaatccaggaagtttccgtccatccagtggcgactgctgtagaatctgcactaaggtattagtgtcactcacgcttccagatggggtatatctcactaagttcgttgttcaacaagacccagttcgtctattttattagtttcttgcggttcaagagtctagtttcttgaaactcccacttcttcagtgttatctgtcggcgacaaccattgcaagaaatagcacttctatcctccctcaggtttcttgtatccgaacatccgacaacataccgacctagggatgtagcggaaagtggggccgtcaaataagcgttcgggtgtgggttgatcgtctgcaggtggtgtggatccgcacataaacagttgtcaagagtagaatagtttcgatggtgatattcaatgtgagggagtcgagcataggtagggaaggagcggagttctgctttggggaagctactatcggttttgacaaatgtcgtccacaaaccccaacacctaagaaagtcgcgctggaccccaaactcccaaccttccaagcaaccaccccaattattccctaccagcacaactacaccaacatcaaaccccgaagcaagatgaagctcatcctagctggcgcgaccggtctcctgggcactgagatcataaaacaaagcttgcaaatccgcgagatcactcaggtcgtcgcgttggcccaccagcccgtgcagctcgacaaaagcatcgactcatcgaagttgaagattatcgtcctttgcgactatggtgattatcctgaggacgtgaaggctgagtttgctaacgccgacgcgtgtatctggtatgtctcgggcagcaccttcattgcctaattcaaactgaccacaacaatttgtgcgtactaccggtagggctgtctccgtcacacccttacgtaccagcaaagccgagctcaatcgtgtattccatgattgcaccaagcttgggtttgaggccatgtacgaggctggaccggcacgtccctttcgtttcatgtacttgagtgcggatggaatatttcgagacccgacaaagaaggcagtcatcatggcagattaccacatgatacgagtaatggattcgaatcccagagctccgtgattctagaacttacgctaatgtcgtgcttttggtgagctagtgcaatgcagagctcatggtcctcaaattcccaaccgagaacgaaggagttgaagtttgcatcgctcgtcccggcgtgattgctaatccctcgacatggtcgagagctttggtggccaaccttttccgtatcgtcggttttttcggacggtcccttccgaatatacaacgcagcgagcttgcagcggcggtgttgaaccaggtcatggatggattcgagaaggaagctctcttgaatgccgatctcgttcgcattggacaaagggagctgaaattcagcagtatgccttatcgatgctgaagatagaaaaggaagttgagtgccaggtttgaggggttctcctcaaactgaaaatttggcattgtctctgttttctttgatttggaatgtcactatgctcctactgagaaaggggcgttggtggcaatccacacgataaatcctttttttatcatacccgaccacaaaccaattgagtccaagttgcaaagtctctaatcgaagcgaattattccgcgatccatcacttttcgtacacagacatacctagaacaaacacatagacgtattttcctaggtgatagtggccaattcctgatccagtggcattgaggcaaatttccatatattatctctcaagttaggtgattttgacagtactagcctttgtagtgcgaggtttcaaacatggactacggacagtccttttgatctattagacctactagtacgaccacattataacgccaaccgatgaataaatttgcagtccagacaacttccctcccccacggagcggcaaattccatgtgggcgactccgcaaaatgtcatgaatggtcataatgacgatgcagaatccccccagcctataactaaggccccatctccaagcaccgacaaatctcccaacagacgctcgataattcccacattgaaaatggtcactcccaacgatgctcaagccctgaacctggaggcacgggaacaagaggatgagacctcggatatgaaagatcctgttgatgccggttcctctgacatggacgaggaaatgagtaagtagcttcccttgaacaattccgactttatcatctccagacctgctaacacaaatcccagtccaggactataggacgcttatagataagaccaacctcgtggacaaagaccgtgttcaaagcgcaaaggctagggtatccaaggcctaccatcaaccgaacgaggaggcaagtgatatttcttggcggcctgatccgtcgggtcatccgcggaggactttctaggtcgttgtataggagtatagttgattccttctcagagaatgaatgtcatattttcattcgctttgtgcacgccagtattgcccacggagcataggcagttggcagtaggatattcgggagtctccataacctctaccatgtgagattgaaaactacgctagttttagaacccttaattctagtaaaaaaagttagacactctgcatatcattgggagaatggtttagtggccaagtagacgttaaatcctactggtcaagatatgccgaccccggattccgagctaggtcatcatgcagctaaaagttaagatgtggcctgcataacgggagatctacacgatctagccacgcgggcctagccaggatgcaaaccttgaaagtttaaggcggcaacacgggccttctacgcgacatcaatgtgttggaaggaagcggaagagataaataaatcgtgtaaacgtgaaaaatcaagtaaatgctatatgtacaagagtcatgtcgaacgccgtcccaatttgtgcaaccggtttccacccgctcaaagctttccctgtgcctccttggccgccttggcgtgacgctcgaaagaggacacggggggagcggagttggggttggggtggtgcttcttgagcgccatgcggacattgtactccaagtcgagagaggccttggggtcattggtcttgggcttgaagtctacgacgagatcatccttgacagcgaagacggagtcgatggcgagatgagggtcgtcgctcgggtagatctggttgatgacggtggcgtagtcggggtgggtaatcatgaggtggatgtgggcgggacgcatgggcgaacggtccatgaggttgaggaggacaccggcggggccgtcggtgggcagggagtaaggagtggggtggtagcagtaccagttgaattctcccttctcatttgatcggaacttgccgcggaggttgttatcggtctgggtggggtcctggaaatcgtattggccgttggccgaggcttgccagatgtcgaggacagcgccgacgatcggcttgccggtctccatatcggtaatggcaccgtgcataaaagtgacacggccattaggcttgggatcctggatgatgctgtcgccgagagcgcggaagggggcgttgggagaccagaaggggccgagaatgacgttggatgtaggggagagaccgtcctcggtgatgatcttgttggcgatctcatcgacgagactgatttgaacagttagctttagcttttctttttttcgcttttgttttctttttttttattagaagcagatgtgaaacttacgactcaaggccgatcacgtcacaaatacggtggccttcgttgcggataggagtgctgatctggccgatagagttgataaactcaacgccgagcatccactcggcggaggtcaactcaacctcacgagcaaagtcgtggatgtgcttgataagagaacccaagaccacgcgagcacgctcgggggtattggggcccatgccattgatgacagagggggtgaagttggggtcgaactggcgtgtggaagacattttatattattggagagagctgtaaaagtcaaggaagtcagggcggcctttccaggtctatatacacgataggcgacggcatattgttcggctggtcgtggatgtggggaagtcgcaacggttccaaacccgcaaaaatcccgttgtcacctgccgaatgtcgcgatcgcgttcatccacgatggttccgttctggcatcggtcagtcctcaacagccgaggggcggctggtctcctattatatcagcgcggggtggccggggtagctcttatccgcgggtaagccccggcacctgctttcaccgccttttgattggttcggcttttggtcttcctcacgtgccgacttgccgatgtctggagtttacggagttgatatgcaatgagagggcaataatacagattctattggtatagatctaattcagctatgggtcaaatcttcattaatactgaatttctaccaaatcgctcacctcgtaatgtcctacatcaaaatccccacagtctacctgctgattgatcttccttaataatgcctgcaaaccctcgcggtcttcgtcgtcacattgtggccaatcctccctatcttccccccccctcgccttgggtcaagaaactgagaaggaactgtaccgctatcaaactccatgtaccggtcacacatcaatgccggcctaaggtccagttctttctcaaaaggcaactcattgtacgctgaatcccatgcttcattgtgaccaattgcaaagcgacagagatatggaagacctgtttcaaatgaggcaaaatattcattccaccggcgtggataatgatagtaccagtcctcgcccctcctgtgcttgctagtttgccatttcattctggatatcagtactgggcaatcgtcaatgtagtattcgacgttcgataatctcacttggaataaaatcgtacaatcgtcaaggtagagttcatggagtgttgacgagtgcgagagaatccaatcaacctgctggtcttcgaaaaaggagaagtttcccagagtgagcgattgcaaattgggaaagtgaaccccttcgaggctgaatttaggataaaatccccagtaaaggtcggagtatagagacagcttccggagtgatcccatcgtgggtttcagccagactaatgacaatgtatgtgcgtagaactcacgcacttcctgtttctgttatatctcgccgaattagtataaaatattatactcagcatatgttgaagatgtagactggcttgtgttactatgtacctcgagttcttcttcagtacacgcagggtcgcattcatgcacaacattcagtctcaacgaacttagcgtactcagtacttgctgtaaatcttcgctcagtggtgtcacgttctgctgatgctgaatccccagttctttcaacggtcgctttaaagacactagccccgtacccagccattctaagatggtttctcggtattccagtgactggggtggataaaaccaaccgcctcgcccatcgcggtttatttgtcgaagcgcagaacaacgcttttgagattcggaatatttggaagcataagtaggagctccttccatttgacaggtagttcaagctcatcgttatctgtgtcggggtcctaatgtgttgcgtattagctacccattgactgcatgacagtgcatatctcacgcacggatataaactccacagtattgaggcggatcttgtgcacgtattctttcaactgcggatgtgttatgatggactcgaaagcctcacaacttatatcctccgcaaacagtgaggctgtggagaacagattcttcgttgcagaggcgcataacatgtggtttgtcagcctcagggccttgagcgtttccgtgtctgacagagacgtgatgatcgcaagtagctctgagggaagggtgaataaggccatattcttgcagtggaagatatgattaccgatcagaaaaggaggtatcagaccttcttatagaacatctggtccgatatgctagacccaatgtgactttcttggcgctgttttctaggcatccttagacagaagggtggcggttagcttgtgtcgacggaaaatcccgatctagctactgatcgctctttgtcctttttattctttcaatcttcgtgaaactccgcacaacccctaaaagtttttatcttatctacacgggttagctcccgaggtcacctgggcaactttctccgtaacgcgatactcatactactgcgagttcataggattactgtactcttcctgacgaaaatatcagcacagacatgatccgtacgttaggcaaattataaggctaaattcattaaaggatttccagttcatgttcaaagatcataggctatccacaagaaaccaatgcaataatcaccaagctaaaacctctttctgagctccacaggccagggccgcacagatctgctcatccttctcgctgacatctgcattgcatgacactttcggtttcgccggccagatctcccggcccgcggatttctcacgctcaaagtgctccgtgatgacatcgcggactgtgctctggaagaacagcggggccttctcgtacttagggtgaagctcgccgctcgtaaagacattccggtcgaggttcttctgtgcgttgttgcagaggactttgtcttctcccatgacgcgcgcgtacatctcactgataagcttgaagtctgtctcagaggagttccggttccggtagatctcgtagtccatcttggagtttttcgggcttgaggggaggaatttctgtatcatgatgaagtgcggcctgtatgtacatgttagacgatgtactattggagaaagcacaaactggaaacacttacgagacaaccatggcagacatggggaagtagtaagtactggccgtgtaaaggcccttctcgatttgctctggtgtagattcgcagtggtgttggatatgtccatctttgagatcactgtcgaaagattccaggttaaggaactcaggaatatcggcgtgtgttgtagggcagtggtaacattcgttgaagttatccgccagaatcttccagttatagtcgccctcgagcgcataagtgtgatcgagatcgtagtcatcgaagttataggctttgtagcgttcttgcttgtcgacgtctcggaaatggtcttcccatgacacttccgggacttcattcgcatccatgttgacccagatgaagccgttgacgtcgaccttcagatggattctgaagagaccgttctgctccttatcgaagttgctcagctcttggtatttcgtagccttggcgagtttgccattcagtccgtaggaccagccgtggtatcggcaagcgaggatttgcgagttcccagatccctctttctcaacgaccgggtacgcacggtgtctgcacacgttgtggaatgcgttgatgttaccctgtcggtcgcgagtgatgatgaagtcgaagcctgcaagctcgtagcggagccagtctccggtgttcttcaaccgcatgctgtgggtgatgaagagccatctcttcgagaatatggctcggcgctctagttcgtacatctctggtgaagtgtaccatgatgcaggcaaggcacgaacggctgaagcttttgtttcttccttgggggcagtggcattgaagccgaaatagttgaacattgaagccatgattaagtaataagaaggtacagtggagagtgtcttccagtcttttttgctttaatggtaatcatatcgatccctttatacgctccagaacaatttgatgttagactgatagccacgtctatacagcgatcatatgaacgatctggttccaatttggtaggacaacccgtcgcgaggcgggttgatcttccaagaacagacatcgaacccgccaacccgccaacccgccaacatagtactacaatccgtactacaagccgggagacttgacactattgttgattattgggtcaaatgttatcaaacccgacatatgcttgggcagccattctctagttctacgctgcagctaggccggcatactacctgtttatctcgagtccatagataatgtagccggaaatacttcgtatcacctacaggcagtttgccaaatattcgttcattgttattgtaaaagagagaagcttaacagataacatataccaagtcaacaagcacaacagaagtctcccctcgtgttacaatgtgcatataccggattaccccactaacctacctagttgaggtaggagacatctcatacattggaattttgcaattatccttcttaaataataaaaacaggctcttcgggtttgatacactccagcagaggcaatcaagcggcttcatctgtggtgctcccactttacatctcaccttgcatccacactcccgccggccgatatcacctcccatcgccgaccaacccctcagaatttaaatcaaaggacctctgatcgccatagaaaggctgctgccagatatcccatggcgtctagattctcgagatcgagtattcccacagtcagcaggcccagagctagcacggttaacctatcaaaccatatacggacgggatattcatccagaagtccctggtgatctagtggtgcagggtgagtacctgggctggatgccaaaaaagcgcccggaagagtaagtctctatcaatctctaggtcctagtggaagtaaccggctctgatattccctcctgctgatccgactaggctgattgactattatggtgccacatttgaccatctcgtcccggctggggatatcaaccctgaggtgttacagattaacattattgagattgaggatgatggtggtgtttatgcgaatacatggctttcgtttgcggtagatccgactgagtttattgggaagagggtactggcagtgccgagatgttgccagaagagaaaggggactcaggatcgctggcgggtgaatgcaatgggggactagagggttcatgggtgggaactgttgatgggaggatttagttaaaggtctggagaaggatcaaaaatcgggcggaggttgagaacttgaattgatatacatgcgctgaattctcttctaacatgattaatacgggtgatgccaaacactggacatgttttgtcttcattgaatagtagtctttctcgttgtttttctctgttttcaagaggaatttggtcgtattcgtataacatcgtcattggagaaaagtaaattgcttccgagggccagcagacacaatgtacgttttccttcggataatgccacgttgaatcttcatccagcatcaagagtcttacttctttgcatcatgcaattcacctcgctctttcactagattcgaaatcgcaacgctggcatcatcccccaacttcgcgaatccctgaatcacaccctcacgatccccaggacgcatttcctggctcatcttgaacttcccctgaagcttggtgatccgaatctcaattccaacaatgtttttcttcaggagatcagtgtacgacgtaggcgcatcagatacctcccacggctccggtttatcaccaccagtataccccatcgacctctccgaatgctgcgacagatcatgcagctgcttggcgagaaatgcgccagtctcgggtgttttggaatcatagtatagcgacatcttgccgtacgcctggacggcggagtaattccatgtaggcacaaccctcccggtatctggctttgtctcgacgtagaatttcggagtcacgtagtgctcgtatttgccattgaagagcactaggacgtcgtcgtcgagttcgagaacgttcggtggcttgtcatccacggcctccatcattgacttgacttgtggattctgcttggcgatgtgggcgcggagataggcgtctgtcttgcctgtttcctcggggaaatccaccacgaatggggcatgggtgcactgtaggaagtcttgctgggaggagttcatgccggtgatcaagaccccgagtgggttatgccggatgaaatggagcaaggcctctttgtccttctcctcgtgggcgctttggaagaacatgttgaatagtagctgggaggttcagaggatggggttggaagacaaagaggcgtgaagacaattgtgtagggacaaaagacccccaaaatgtcacattgtcggatcgttgatttgttatcaatggccaaggattcgtccactaaaggcatgtgcaaccggctgcagagacccagcggggcgggaaggcgcagggactttggcatttccccaccggattatcgaattcccgagacaaggcgaggagatcacataaaagttggaatccatcattgacaaggtcagacttgagatttatattgcgctccaaagaaaagcagtgttgtcctgggggatggtagcagtctatcatcgttcatatacaccagattgggtatagcgcaatctagcagaaatatgaagggctgccattggtcgtctccagtaggatccacttttgtctacgacacaaatccacacacaacttgatatacggcttgagacactaccaccagaccccggtataaacggggcgcgagtttataataaaaccatccattcgatatataagatagggggatagaaagagggtataggttgaacgcaataaaccgtgaaaaaaccagcatagaagccacacaaggggaactagaaccaagactccatcgctccaaaacaaaagccacctgcgtaaaccctcaagatacgccgatttttgagtaccagcaggtcacaagaccccgcatataacaatcgaatcccaatgactatctgtcaatgagatcagagtagaatatcaatcaaacagagaaagatgaggatagtctggcatgcgggtcatcgttcagaaaaccaacgcagctcgatattgcatcgtaatgtgttgacataatcttcgtcattcctcatggaacattacattgcgagactggctgagcctgcagccgcagatccccagcgcagttttcgcagcccgccgcggaccgcttcctggccacaccccactgaggggcgaggggtagaaacaccatctcccaccattccgagctcggctcgcccaacctcacggccaatcatataccccgcggaaaaactgattgcggagaatagaacgacaacacccgcgctgatgacccatgtcatgaccgtggggctcatggccgttgttggatccgtcatactcacgcgacgactctttttcgaggcaacaccgcggtctttgggagaacttgaacgacgctttgctttggaggcagagtcagctgataccgccggtgctcttacgcgtctctgtggtactcctatagacgggcttgattctggatagcgcggcgaggatgggctctcttcgtcgctgctatcatctcccatggcaactgatgggccgactagtcggaatgaagcaggttgtccgcttccagggggagccgccggggtatctgatggtcgactatcattcttcggaaggcctctggcggcagccgcacacgaaagaagtgtggatagactggcacgaagggcggcatcgtggtcggcatgatgggaaggggagatcatgttgtaagggctgtgctgatatggagatctccgcgatgaccgtgggttggggtaggattctcttcgaggaacggtacggcgagtagaggcagacgggacactagattgtggacgccgtgcagaccatccaggctccgacgtcgctggcgggtgtgtgaatatgtttggttgaggtacgaaaggtgatgtgttgattcccatccctagggcagtagaactatcatcttcatcatcgctggaggcagcatctgaacctgagaaaaggggtacagagtgcgcggataatgcagttcgcagccttgggcgggtcatatcttcatttgagctgctgagaacatgatcagactcgctttcgctctcctcatattcctcttgactgctactggtttggctggcatcctgcgacgcataggccgcctgggcagtggtaatagcggcaagatgttgcagatggcgtcggcgactgcggcgctgatatgcgcccgcgcctctttgctcgacccgtaatccggttgtaattatatcttcatttgtggcagcagaggaaatggaggaagaggagggttgggaggacacgtcgatccaagaatctatgtagtatcgtagtgagtacattatggagatctgggagcgattttgtatgcatattgaaatttcaccggaaagggggtaccggtcgcattataactacataccctctgatctcatgggcgccgcacccgatggctgaggctgaccgttatctcgaagcggctgatggccatcgcgcgtcatccgacttgcggctctagactcacgcgcctgacctagtaggtcgcagtgatttggttgcatattgagggttggaggaatatgggaggatatgggcggagacgaacaaaaatatagaaaagagggggtcaggccaccctggaatggagcacaagagagcggtcaacgtggggcgggagagattatcttatcaaatgtggagtcgatcgatcgatgcccgacacaatgtatactcctttctgctaacaaaaagcaggagatgaaaggggttgaaagggatcaagatgattatgtttctctgtaggacagaatgaaaagagacaaaagaaagatgaagagacccaggtggaaagaatcgaactgatgaggtgatcagcggaccgaacaggtgatttgcagctcgtgacaaggggcgaaagacgatgcgaggggttgtcagaggtaaagggcgggtgttgcggttcttattgtagattttgagatcagaccttctttcatcaataatccgatcaaagaaccttggagccttggaatgagttgtaggcaacacaaagaatagtctgggcaaggcggcaaggcggttactagtggcaatatacttacaacacgaagaatgaaaaggagcaaagttgatcaaaatgaaaatgaaatgatgtatcaaattaaagatacctgagctaaggtcatattacacataattaagcacgaacttttttctctcaaagaagacctgagacccatgggacaccgatatgatgcggaaatcaaacgtttaaaggaaggcacctcaagttcagaaagtgaccttggtacccttgaactcagggatgctgcccttgcccttgttgaggccaccacggccgccacggtcgccgaagccaccacggccaccgccgcgaccaccaccaccacgtccaccgaaaccaccgccgccgccgcggccaccgaagccaccacggccaccaccacgaccaccaccacggccgccgaagccaccacggtcaccaccggcaggacggggagtagagaagtcaagacggatagcacggccctcgagctcgtggccgttgagagcagcgtgggcagccttggcctcatcaatggaagcgaactgaacgtaaccgaagcccttggggcgtccagtctcctgctcagtggggagacggattccgagaacggagccctgggcgccgaagacctcgtggagagcatcctcagtagcgctgaaaggaaggttaccaacgaaaagagtgtcgctctcggggctggtggtgtcaccgtatgagcgagcacgatcctgggaacggtcggcaccctgctgggggttggcctggcggggagcggcgtagtcgaggttgatggtacgaccatcaagatcggtacccttcttggcctccatggccttagcagcatcggcggcgttggtgtactcaacgtagccgaagccacgcgagcggccagtctcacggtcggtaacaatgcggacaccggaaagctcaccgaactcggagaactcacgctggagccactcctcgtcgacgttccaggacaggttaccaatgaacaggttggcgacggcaccctcggggacatcctcggtcttggacttcttggcagtggcgtcaggctcggcatcagccttgcgcttcttggagacaggggtctcctcggagtcagaatcagagctgtcagagtcggaaccagactcggagtcagaagaggccttcttggcctcagactcagactcagattcagagtcggaagagtcagaagactcagccttcttctcagccttcttgggggcgggcttctcatcctcggactcggaagagtcagagtcagagtcggaagagtcagaagactcagccttagcagcaaccttcttctcgaccttcttgggggcaggtttctcctcttcggactcggaagagtcagagtcagagtcggaagagtcagaagactcagccttagcagcgaccttcttctcaaccttcttctcagtcttcttgggagcgggcttctcctcctcagactcggactcggagctggagctggaggaagcatccttcatatcctcatcagactcggactcggactcagactcggaggagctgggagtaggctccttcttcttgttggtcttcttggacttctccttggagatgaccttgctggcaacggccttgctcttggcggcgggggactgggaagccttggtgacaccggcatccttgaccttgttcaaggccttgctggccttaccggccttgccggccttatcggcacccttggtagatgtcttggacatattgaactagaggaaaaatcaatgttagccaatgctcttcgatcaaatggaggggactcaggaagagggcttggaggctggcttgtagcttgggtagggtggcacatactttagtgacaagtgaaattcttgtagtatgtgcggcaaagcccacgatccctcaaagcacccgtgttttggatgtgtaaaatggaacaacagccctcagaagaactgccagaagtgaactaaatcacagctggacgttaacccactacccacggacggacaagttttcaagcccacaagcaaccgacagctgatactgtctagaatatgtaacccacgaggaagatgtcccacagagcccacagaatagatgtatgtcaagcccacagccctcagagtgataagaagccctcagagtatccaaacgaacttacgagatagaacccacgcgactgcgttagttagtgtgtagaggtctcttgggtagtcaagagatgggataagtaaagcgacctgagacggactgcttattgaacgggggatgagaaaagaagtagggaggatggaaagaggaagagaaaaaagtgtgaagagctggggaccatcagctctgataaggaaaaatttttgaaaaaaaaattcggaggctggcagaaccactccgcctgcctaaagaggctagcgcaggcactcggtcccaacactatgtgggtaccttgccagtggctgtcgacgactcacaatcgcgtgttcacttggcggtgccttttgcttttgtctacgtcgtgtacctgctacgtcaattcttctgctatcactatactcgtccaggcaccgttcgacttttttttagctcgatagtcaatgggacgataagtttccattggcctttaacgtgatggcccctccgacaccctcctcgcaccgccctcgcaagaagagaaaggttgcgatctcccccggctcaaacaataacctgatcttggatctaggcgatgggaagcaatctccagcatttccactagtctcatttttgtgggctgctcgggccggtgtgtctcaatggctgattctcccacttgtcctcatggccgttggcctgttccgatgggctgtgagcttatggggttactctggtatgcgacattgtctcttcggaggtcggtacatattttaatatcttctagggttccaagttcccccgatgcacggtgatttcgaggcgcaacggcactggatggaaattaccacacatctgcctttggcaaagtggtacacatacgatctgcaatactggggtctcgattatccaccattgaccgcatatcacagctggctactcggaaagatgtacatttccctacctgccatgcattgtggaatttccaggcctcctgctgacccgtcgacctctctagtggctctgccttcgatccagcctggttcgccctggacgcctcgcgaggtttcgaggacccccgtttgaaagtttacatgcgcgccaccgtcgtggtgtctgaatacttggtgttcatcccggccgtggttaatttccttcgccgctacactcggatgcagggtgttcatgcttggtccgcctcaattgctctcgtagcagtcctccttcagccagcgaacatcctcatcgaccatggccatttccaatataacacagttatgctgggattggtggttgcaagcttggacgctatcttggcggggcgtatgctctgggcttgcattttcttcgttggtgcactgggattcaagcagatggcgttgtactatgcaccagtcatgtttgcctatcttcttggtgtctgcacattccctcggattaatattccccgtcttgtgagcatagccctcataacattggctagttttgctttgctgttggcgcctcttttggttggtgcctccaatgccgaagctcgaaaggcatttgcatcttctccggtgccgccgatgttgcaggcacttcctatccacatggacaagaatgctgttgcatatgggctattgttccaactaacgcagatcattcaccgggtgttcccctttgcgcgtgggctcttcgaagacaaagttgccaacgcttggtgcgccattcacactttttacaagctcacccgctttgacactacattgttgcagcgagcatcgctcggtgccacattggcgtcaatcatcgttccatgtgctatcatcttccgccaccctcgggcctcgcttctccttccagctctatctgccgtctcctggggatttttcttgttctctttccaggtccatgagaagagtgtgctgctgcctctgctaccgatgaccctgctgcttgctggtaacggtggactgagcaaagaaacacgcgcctgggtgggctgggccaacgtgcttggctcatggaccatgtaccccctccttaagcgggatgagctccgcgttccttacatagtcatgactctgctctgggcctatcttcttggcttgcctcctacttctttcgaaacctatcgaagtcggccatcccaggaagattccaatgcccaattcgaacctagcattctcacaactcttctacacttctctttctatttggccatgattgcctggcatatcctggaggcatttgtggccccgccgcctggaaagccagatctttgggttgtcttgaatgccttgatcggagctggtgggttcggaattgcctatttgtggtgtatgtggaaactatttacccaatgtcgcgagatcagtcggcaggcgaccgaggaggaaagccagaaaaagaagcagtgattgttagcccaggtggaggctgtatgattttcagtgataccctatattgtgagattatccaaaatggagcagtaaatctgcaaattgtttcattaatatgattgagtttgatatttctttaagaggtgagacgttgtattgggaaactagtgccaaactttatattccaacatgtcacaaataaccaaacatgtcctcaaacagacgacatccggagaaaacaaaaactcccgccaatgaatgctatagtacaatgttgtatagtgatagtacagccgagggcattcggtcagagatcaagtctagaccttgaagccaaatccagccatgcaagtcttgtactgctcgatcgtggacttgcactcctgctcggggttttcggacttggagaagagcatgcagtcatcgcgagcggtcttctcgggtttgcagacgcagcagggctagaatgaaggcaggatcagtcgcttgcgactgctgggtcggcagtatcgggtcataccttgggcttttcggactgggcgggctgagcgggtgcttgctcaggggcagtggcacttttctctagaaagcattgtataagcgagggtcaaaatatttttctgacactgatatgtaggactggcgcattgcgcatgtattcggcccgactaggtggaaagaaaccttgatttaccttttgaggaaccgaatagccaggacattgtgatggatatgtaaatgtgcttggtaaatatttccagtaaacgaaagacagaaagagagtgtcaagtatgaagttgtgaaagtcgttacacgactccagggctgacaccatcggacattattaatggcaagtgctgcgcaactggtcgccatgccccgccgtatttattctttttttctgttgtcaacaaagtcgcctctccggggtcgcctcctacactacagactgtttcggttcttttctgtctatccttaggtcttgggtctcctcgtttctaggatattgtctgccattgacctcacgcttaccctattctatttctatttcttatctcattctcccacttcaacaactaccccgccatggcccctcacaaggtcttctccctcgagggcaaagtcctcaagctcgacaccgcagaggacatgaatgcacacattcagcccttgattgacaacaccgactacactgaaatccgtctcggtggaaacactcttggcattgacgcctccaagcgcctggccgaggttctgcagaaccaaaagtgcctcgaagctgcctactttgacgacatcttcaccggtcgtctcctgacggaaattcccactgctctgaactcactcctgaatgctatcctcaagatctcgaccgtccacaccgtaaatcttaacgacaatgctttcggtctaagaacccaggccccgcttatcgaattcctctcgcgccacgtacccctccgccaccttattctgaacaacaacggactcggccctgccgccggatctcaggtcgccgatgcgctgtcaaagctggctgagcgtaaggaggaagctcgcaactgtggcgaggaggtcgcgctgctagagagtgttgtctgcggacgaaaccgcttggagaacggcagtatggaggcatgggctcgtgcctacaaggcccacgcggccggcctgaaatcggttaagatgacacagaacggcatccgatcggagggtatctcccacttgttgtccgagggtctctaccacgcgcattccctggaggttctggatctgcaggacaacactttcacccatgtgggctccaccgctctgtcaaacgccttgtccggctggccgtctcttcgcgagcttggtgtcggcgactgcttgctctctgcccgtggtggtgtgaaggtggcccaggctttggcgcagaacaagaacccgaaactccagactttgcgtctgcagtacaacgagatgaaggcggaggctgtcaagagcttcacccatgcagccaagactgcgcttcccagtctccgtcgtgtcgagctcaacggaaatatcttctccgaggaggatcctcacatcgtcgacctgcgtgagcttttggaggctcgacagggagagcacggtaccgacgatgaccccgaggatacttggggtgttgatgatttggatgaactcgaggaggaggattcggaagaagaggaagaggaagaggaagaggaggacgaggaagaggccaaggctgacaaggacctaaaggatgcggaccttgccgaggaagagaaggtcgctgagagagaggataaggacgtcgatgacctggccgatgttctgggcaagacaggtatctaaacctctggagctgttggataattgtcacttctatcagtacctgccttccatcacggacggatcatggatccaataccacgttgatatcatcaatggctgagaaacccgcgccctcggcttaattggtgtcctcctggccatccatggtccctttctgtgtccacggccacacaagcttcgggtatgaggatctcgccgacgacgcttacgctttgccttcaaaagaccccgatttttatacccccaatctccaaaatggaaccctagcttgcacataattccctttgctttgatccatattctgtttgcatagccatggacccccgtgtttgcttcggaggatacacaaccatatagatggaatacatatccggacaagcaggaacattcaaatactcatatatctcaataaataaacaagtagtgtgtatacaaagttgcatataaatggaacaaaaataatttccgaaaatggaacccaaggcttggcgcagacctcggacatcgcagctcatcaaattccttttacctcgtcgcctttgacatattccctctaccatacctgtcactattggcgcttccattgccgtcgcctttccgctctttcatttctttacaggtctcatctcgcaacactgtaccgtggacgcgaccgtgaaatatccccaggtgagttccgcaaaacacccctcactacatcttgctttgcgcaatcacccgttgttcttcccggtgcaagctataacagccacatatgctgctgcatgccgttgtttccaatcttctttgtttgttttcatcgagtttccgaggccaaatgggagagagagcggacacgtgcagttgacagtaccaccttctcccgcattgtctctatggtggggtattttaagagccatgttttgtgttacctttgttgaaagcacgtgtgctctatgatctgtgatcccaacagggagacaaatgtgcctgctgtggttctggagaatgcgccaacatccggggcttctagagaccctgtgctctatatgtttgcgatgacatgctgacagataggactcatagatcgcctggaaaatcctcactcggtcctccattgaccccgtcaagcactctaatcgcgtcatccctctaccccgcacaacatggcgatggacgctaaagagatcgaagctaaggccaaagccttgggcaaggccgcgacttcgaacgagtcgccagctgtgattatcggcctcctgaaggacatccaaagcggcgtgcgggcaaccgaagacctcctccgacagacgcgcatcggaatcatcgtcaacaagttcaagcagagcaagaccccagaagtcgcgcggctctccagcgagattgtttccaagtggcggacggaggtgaacaagcagaagcaggctggttcggcagccggtcgtggttcgagcggctctccgcggccagcgcacaacggtacaggagcgtccactccagccactgcgacaccctcagacaaggcgtcgaagctgtctgtgcctccggataagcgaacatggaaggcagacggggcggatatcaatcataccgggaaccgagtgcgtgacagctgcacggggctgatgtacgatggactgtgtgtggggtcgaccgagtctcccaaggtcgttctagcacgcgctattgcggtggagatttctgcctacaagtacctggggccggagacgaaggaggaataccgtacgaagatccgtagtcttttccagaatctgaagaacaagtccaacccgaagctgcgtgtgcgcgttgtcgagggagagattactgctgagcaattcgtgcgcatgagccacgatgagctgcgctctgttgagcagcgtgaggcggacgctaagattcagaaggagaatatggacaaggctatggttgcgcagcaggaacgcagtatcagtaagagcttgcagtgcggcaagtgtggccagcgcaaggttacctacaccgaagctcagactcgtgcggctgatgaaccgatgaccctgttctgtacatgtctgcactgcggcaagtcctggcggcagtgagctcggggtgggggagcggaaatgtattattttgggggactcggtgtttctttctttctatttcccttttctctttctcggttttttctatcaagcgaaggttatgaaggccgaagctggagttctactgtgggcctttgatttatgtcttcttctacatctcgaagctcgtctgggcaaatggatgggaaacagtcgtgaactatctaccaaaatgcagatatccgaatgattgatctcaactcttattcaagtactccgtataggtgttctactatataaacacagcaacgtcatatgatgtcagtatgcactccaccgcctaaggatctcgaaccatagcttcaatcactctcccattaatcccatactatatctacactccaaggccaacaaagatccccaacatgacaacacgctcagacctcctgaaaccagtccaggccctcatagaagccctaacgaacccaaacccaacaaaccccaaccaactcctctcaaccttcacaaccctcccaaaacctctagcctacgaacacggtctcccacaactagcccccttcctaggccggcccttcaacggccaagatggggtggcaacgtacttcgagctcatctcctccctgctgggaatcaagaacatggccttcgagcccgaggagagctgggtagttgacacgagctgcatggcagtttcgctgcgcggaacggcgacgttcgtctggaaggagacgcggcaggcatgggatgagacgttcatgtaccgcattaagcttgctgttgatgggtcaagggaagggggaaggttggcggtttgtgagtatcacgtttgggcggatacgggcgctgcgtatcttgctaggtgtgaaaggttgggggatttagtgggttctgcgagtgatggtgaggggattcatctagattacgatatgaacggggaggatatagaatagggagagatatatatatcagccaacagcaaagatatagcactggtgattgtgccaatcataaggagagagtgtcattatttgagagatttttctaggtaggtccgggtggtatacatgtattctacactctttgccgttctcctcggattattctatagggctggggcagtctatccctcgaagacgctgtggttcagctcaacacccatatccttggccatattctgcatctgggcctctatgtcatcctccataccaccacccagatgcaagaactggcgcaccttggtgaaatagaagaagatatcagtgctaaacagcaccacgcggaagataaaatggcgcccgatgttgcggatcttctcggccagcggcagatccggcgactcgataagcgcccgcgaagcccagataccagtgatcttaacacggttcaccggcgagcccaggaactggttattaccttggacgatgcgcagattgcgaccgatgaagatcagctcctgcggccacttggtttcatcgccgagcatatcacggaccgccttgcgcatcccctgttgcatctcgtagtgccgctctgcacgctccgacttgctcagtccctggagaccgcgctgcgtggacttgtctccgccgctgtagggacgcatcaacgttgctgatgcgaagatgtcagcgttgttcacgccccagtccttggcaatctcgcccagcgtgcgattgtcgaaggtaaggagggctttccagaaccgcgcgtattggtgtcggaacttgggatccatgtggatgtacaggccgtggtcgatcagaaccagctctgcctttccggacggcttacggcggatgaagatgttgcctgggtgcgggtcgcaatggacgtatccccacatgaacatctgggcagagaacagatctaccatggtcgtcatgacgtccttgactgacagtcctagcccgccgttgtggttagggcctcgccagtagtcacgttttggcttggtactcggtcgattcgcagaaccctcctgcggtcggtcaagcggtgtaccgtgacagcctggacttccctggtgccagccgccgcgccagggccgcgtgatggagtctttatcccagagtcgtacgccttccacccattcagcagtcatgacgcgcctcgagctcagttcgcggaatactcgagggatatacacgcggtcgcgcagacggggttcagcggccactagcctggccatgttttccgagttatctgcttcatttacgaagtctgtttcgagcgatagtctctcactgatatagggaacaagactgttgaaagggatgtcgaacattttgctgtagacaaaggtcacaactctttttcaatgttagcacaacattctctcgcagctgcaattcggactcacttaaaggcccagagatcccatgccaattgctgtacgatctcccgcttttggaccttgatcgcaatctccgtgccatcctgcagacgagcccagtggacctgagcaacactggcactggctctggctctgcgctccatcacgcccttatcagggtctcctgtaaatgaaacaccgaatacctcctccggcgacttcccaaaatcctcacggatgaccttctcgacatccttccagtcgttctgcggcgcatcatcgaacatgcgcgagaacatctgctggaactcagggggcaggatagcagattgcatcgcaatcgcctgacccatcttcaggtagagaccgccattatgcctcaacagatgcgacaaccgctctgcggtgcgggcgtggacggcagtaacagagctagccagtggtgggtgtgctcggaagttaattttgtagtcgagggcgacgaagataccgagagaaaaggtccgggctgttcgagtcagcgatgaggcgtagaactggcgatcgatgccccaggcgacgcctgttgctagtgagacatagatgatccggcgtaaccatttaatagttcgtttgtaggtctttgcttctctgggtttccctagggagctcggtgacggcggcacgaagggttggaattggcttgagtgagcatatcggtgcgggcgccggagtgagggacggatgacggtgggccgcacagagcggaggaaggtcgcgtacgccatatgaaattgtggggaggcggatgcccaatcactgcatggtgttggcgatcaaatccagtctgatctgaggtgaaggcaaaggaatgagaaggtcaagtgtcgatttatcaagtaagccagtaagccctagaggtcggactgtcgtcatcggtagctccgcatggagtcggagtcggaggaattcagcgatgtcttattcagctacaggcacattattaattgaggtgaatcggatataactgatattaattgcatttacagcactatttaagttgaatcagggtataattcataattcatcatggtcataaacccccaaagtatcacacactttcgcataatctctcatattctgaggaatcgtggtatcccacagctcgtcactctccaagaaccgaagctgctccttacacgattcctccgaagccattggaatcaaagtaggaagatgtttgatcgaggccttgaggaaattgcgcttgaagcagttgccaaacccagccagcgtctctggatcagaacagatatgtactccgccgcccagcattggtccacagctttccttgatcttgagcgcaacgtcgtcgcccatcttcaggagagcctcttccttgtggggtacattcatgcgctgcatcaggctgcgaacggcggggacaaaggtgttgttgcgcgtccatagatcccagtgggggacggtcggctggcatccaacgtcgcagatttcactctggaatttaccgaagaggtgggctggtcggctaaccagcgcggagacgactttgaagcatgatgtgccgagggctgtaacgggagagaagagcagcacgatcacgaggaagaggcgatcgaggaaaagccgcattgtgtgagatacagaggacgagaggctaaggaagagaagaccgagttcttctgaggtcttccaattgcagttttggtgaagagaagagaagacgtgagatctgattcccccgcatttgtggagaactcggaacttcgtcatttgatgttcacaggtgtttattgcatatatcagcaaatggacttgcatgttagccatgatcctttcaggtatctctcatatcccttgctcaagccatgaaaaccgctgattctaaatctagtgactctaccgagatgcccatacatctacaagaggtggactctctcgaagccattgttatcatcgacaatgagctagatccgctgtcgcccgcagctccggataccgtccaagtctcggggaatctgggggcaattgccatgggctcaaagcatacactgacagaccgaggagaagcctgcaaggaattgaggctggaagatgtctgctgcgcagcacatggcttgtcgattatggtggtaagatgttctgcattggactcttgaatgcgttctcattaatcctatcttatagactgccacaaaaggaaagaagaagcacgctattctcttcgatgctggtcccgaagaggaggcttgggagagaaatgtgaaacgcctgggaccaaatctctcctctgtggaagtgattcagctatcacattggcatcgagaccactccggttcgttattgaatgaaaagaagcacattcacacatactcctcggttgttctgacattcgctaggtggtcttctgcgagcaatccgcatgataaacaatgccaaacaagccgagagccgctcagagcacctagtcgtggacttgcacccagaccgaccagtctacagaggccttgctctgcccgagcatatcatttccctcgaggctgaccctacctttgaacagattggaagtgcaggaggggtggtcgacaagcggagcgagccacacaccgtccttgatgacttctttcttgtctctggggagattccacgaatgacgccgtacgagacaggtctgaagaatgcagtgcgatatgaccctgatgagaatgactggttctctgacgaagtcatcatcgatgagcggtctctcatctgtaatctcaagggtatatgcagcctaaaccctcacaggcttattgggctaaaattttcttaggaaaaggacttgttgtttttactggatgtagccacgctggcgtagtcaacacgaccaaacacgccgtcgaactcaccggtggaacggtacctgtccatgccgttgtcggtgggtttcatctcgccacaagcgacgcggatcaaatccaaaacacagtagccgatctcaaacggctcgatcccgccgtgctgatgcccggtcattgttcgggctggcgggcgaagtttgctatcgagaaacacatgcccgggtcattggtgccctgcactgtcggctcgagaatcacattctgattccccttgagacggtttcatctgaaactctaatacccattcaaccggttcctgtaggctcgttttccacgtggacgcagggtcttgatgcgaaactgcatggcatgggttgctcgagcaacgagtttcgtcaaggggttatctcggtctcagctcggcataatttgttctgttgacggattccgattactgacataactctattcccttgctgcatttccttgcgatcggaagaatgcggatggatgtagttgactgtttctagactttgattacggagtagtaagcgtgacatgttaggcatacagtgaaggcattgatacttctggctgatttgtagcggcggtttatgatagttgaataatatacgtcggaaatgatcaattcactctggagattctccatcacataaaacattgagaagttcggagctgcataagatttgtagttgaatcgaacctgatatatatttccatgtatccaacgacaattgtatgctagcaacatctatttcctctaagtttatgagacgcggatgtttaaccttgctctaatgatctataatatcttgcatctactgaagaactttcaatatatatgttctacaattaaacaaggcagggtagatgtaacttccatccactacgttatcaagtctccaagagatcagatcatcaaacatcaactattccatgcacgttagttctacgcccacgtcagataagccaaaaagtacctcactacccatccacagcatacggacaggatacagtgtaaccaccagcaacgacaccaagaccacccgacgtcagctggactaatcctccaccgctccgtcgtgcattgttctacagccaagatcccttggtagtaaatatctaccgaatccgtgagatacagcatccaaatatcagcaaaacagtcagtttccgtcttggccgacgaaaatccctcagcggcagagtaagtagtaactagtatagttatcgatcaacatgaacaaatctaaatgcgcccctgacagcgccatgccatgccacgccacgcccctcacagacaacacctccgataagagcacgtcctaagctgtatatctcacattgctacctactgctacctacatactcacgtgcattgctccgttcgtacctagcacggagtacggagcaccccgtacgaagtacatacaagtacaagcatgcacactgcccccgccaagacgcaaccacaacaagcattaccaacaaccacccttgcgctcgtcgactcccctctcctctccaccccgccccacgaatccgatcacggtcgcccgaatcatgacctcacgccgatagaaaaaagggggctggtcagaggccgaatgcctgccaaggcgataatgcgggaggaagggatgcacggcctggcttggcgtcggtggacaggtacgagattagggcgatcagcagatcaagggagggaattttctatgtagattgtctttgatgagccgggggaagatacttgacatcattgaatgactttatcgcgttgtgtgcggagtatagtcggtagtgtagatacgtgccaagagtatatttggatatcgtcggtctttgttctccgagatcgagtgtgggggagacagggataggacgcaatactcaggataattgtgggttgatggcttcggtcgctggtttatcttctctttggggtatctgaatacatgcccaggtgtgatctatactatacaggatccgtatacttccttgggtaggtcaccaagactccgattcatagcgaactatcgatatccaagacaatgagaacaggacgcaagtcgatcccccaccccgttctgacctcagactctcataaataggcaatgcccagcgtccatactacctagccaagaaaccctagtgaaacagagccgtgaaactcgaacataatcgcgcctctccttctgttatcggatcttggcttgtgcctgtctatcgtcgatcatgaagtttaatcccacattagccatcctaatcgcgacgaatgctattgaacagtaacgctgcacgcaggcagcatgtcgatcccctcgcatcccccacgaatctatccctgtcttgcttggcatgcctagacaaggtatcccgggacaagctcgcagtacgcagagggtatacggtacctgtaagacggggaaaaggataacaaaggatactgaaacggtgtctgggctattttgtgcttgactgcgccccctggatttaaaggtagttacagttactggctgatactgataatcggcaatggatggccggggagtttaacggtggctatgcagatgccgacggaggtgtcctgcaaagagagatattccgtagcctagcaggcagtctcacaccgtccttctatgaatagtaacagagaagcaaagcaggcggcaatggcgacaccatccaattcgtctcatagcctccgatctggagaaaattgggatcaaccaggtatcgtgaacaccgccgatcactcgcccgagagacagtgacagtgacagtgacagtgacagccagcccgagacgcaatactgtaacgttaatctttctgtagcagtctgtgtttcaacattatacaacacagccaagaatatcaatacgtcacatacaattattgaccatatacatcgctacagcacggggagaggagcgtgtgcattattattgtggactcgactgttttcccgcagggtagttcgggccacctaccaaaacgcagggagagcaaatctacgaactgggtgtattaccccggagctatactaaagaaggcaataattaggtctgttagagtcatacctatgtcgtagtaacatgcatactttccttgcgtcacaggggaaagggaaaaacaaagcgactgtctttcactgattagttttttcctaatccggaaagacaacacacacctccccgacaccggactcagggcgcgtcgcgctaatggccagcaatactccggagtagtaaatagtgatatgcaaagttcccttgcgaccagtagcaagcgcggaaaatatatcactttgcatgatctccgaaaggcgacttgccagttgtgaggttcgcgtcgagggagtgtggggtgttttgttctcctgtcgatcgctgccggatggggaggacggaggggactctcttagcttgcggtctggcttggaggggaatgatttggtcgattatggggatctagactatggtgattatgtttgctcgacgtggcgtgagtcgtcttatgccgtggatggatggcctgtgtgtttatttattgcttgtttgggtatcgtgcgatagcgacgaggacggagagggtatgtcatcatagctgtcggattcgtgaaaggcttaggggaggtgactccgtgatcacactatcacccggtatcgtatgtttctgtgtgcgatctccacagtccagggccggacttgcggtttttccgacgtgggattccgacgaagagctgtctggccaggatattgaccactgttggattttgctttctcatcggtgcgtagggggcgtgtcggtacctgactactaggatctgatcgacgcagggttgtatgcagccaagagaaatgtagcattagatctcaatataatacaccatattatccgatgcacacgatctagaaatgaactgtgtacacaattcacatgaggctgactggataattctcccactattacctggtggcgcgtaatggattcatccatccgaagtaacagaagaaattacagccctgccaagaactgcacaaagaccctggaactgcgaaccagatgaagcaagcgttcaaagttggcaatgagcaattaaaatccgatatgtaaccatagtcgacgacgcctcacgcccacacaacgctcttcccaaaccgaaatcagacgtgccgagttcccgcgtgccgcgtcggagtttcgacacgggatgcccgactggccgagtctacaccttacaaacgatcatagccaagaccgagaggggaccgacataatgggaaggcgatggtccaatcgtggggcgggaacgagaaacctcaatattcgggggattgtctgcatgaggtaaggcaaatggacaacgccgggcacagacacgcggggctgagggaataatgtacattgtacggagtacggagtacacatagtatgtgctctattgtacgcacggaggacaggtattaattccatggggttgaataatatggagtccaggacggagtatacatcacctacccccgtagcaaaagaagcagcggtgatagtcgttttccaagctctgaccatcctacgccctgggaaaaggaaagacataacgtcatacgtcatacacgattagccgccgagtctgagattaggccaatatcccacgccgacatttttatattgcgattgcgtctaggctgtctaatttccgagcagcaacagcgcatttctcgtttcaaattgcttggagctctcctgcaggtgcgggaaccatatcacgctagaccagaacgggaatcggggtgaggtacgtgcacggtactcccgaggttcggtcttgggcgtattgggggagtgtttttttcgtttcatttcattttccgtgtttttttcatttcggcctttgttttctccatgggtagccgatttctggggtgagcaaatctgggatagcttggcgaacagttagggtagtacttttggtcttggtccttatgcaacatcagcaattcattacgagaatacggagcgctgtgctgtcaaaggacggacctcgcgcacaggcattgaatcccgttctccggagtgactagtcccaaggatgagagtaacaagccttgtcggtgtgaataaaggagctacggagtagaaagaaaatgcctcacgatctgagatcggcaagaaaaccgcggagacctttgtccgtacaagctacgcgacgctagcctccttagtggtaagctatactccgtaatcaaggaacgatgtggcaggcgggcgatcattcagtgggccgcgagggtttgattcagatgagagcttcctgcaagcgtatttcgcgcccgctgattgctggacggagctctggtccccatcgcactattcgcgctactgtaggtacacggctgcgaggcgaaagccaagccggtgctaggagaggtggtcgataccgggccagtagacgcagatgaaaggggatgccaatggaaatcatgtggattcagggatctgggttcgatgatggagggaaattaagaattaagttgtgtgtccccgtcaattcgacatgaccctttcacatgttgactaccgagtagttaacgagtgcgatagactttgctttagggctattattcaatacggcatgtccaagctgaaggacggtcccccgtatttttcatttcagtggaaaattcaccccggtaattacctgactcagcactccctaacgatcatgattggtgggggactggggtaatctcgctactcgggcgttccccgaatcagaaatgcgcttttatggattttcaatggggtatagaagagcatcgggttagtctcaacacaaagcgaaagcggcatgataagaagtcatgacgtgatactgttattcttatcatccatgggctgtcaattcgcattgtgccgacatccgtctattgacaaggataaagcagaggcaagggagggaaaaaggtaaaacgaaaaaaaaagaaaaaaaagaaaaaccacctgcagcaaacctgcattgcatccatgggacggtgacgctcgaaggaagaggaagccttctagaagccatccagaacaccctaaatcgataaccacacgcacctcggatccactccgagaaatgtccaaatggagatgatcaccgactcggcaccgaaacctctctagctcgatccctctagggccagcctgcagtttactctgcacgcagcagttttgatatcggcctcatgcctcaccgtcctttacgacttacgatatccagcaattgatcttcaatttctctctttcgttagtacgcccggttcggtccggcgtgtggcaatcataatcatctgaatgcgaatggacatttgcggcattttgttgcatgacgcaggacaagacacatcacgatcggaaaaacgagaaaaaaagcccgtgcttctcgccgtcagcacgctgaattgatctattgatctccagaccaagcctgcaagcgagacggcagcagcggcgcgatcgcccgacaactgcgaggaatctccgatgtctttgaaggttggtttccgggaatataccttcactaactacatatcgggcttgagacggtggcggcgtcgatgtagagctcatatccgaccgggaagaggtgattcgccacgggcgcatatagatcaatttttatatggagttctccgtacttcgtctccgtacaatcgttattcttggggtgtgtagcttccgttccggtgggatgggcgatcgtggaacgtccatggatgtttcccagcctcccaatatgggcataccgtgaatccccgattacgtctgtgatataattggaactgggtattgggtgcatcatctgtacggagtagcgtgcaaagtacggtactccaggtacaaagtacagtaaagaatagtagaattgactgtcccaagatatattgatatctactatactctcgtacctacggctacggatctcgtcccacaccctcatccatggctcgccgtgggggaaaaaagcagaaaagtcgaaatttgccaaaatcccaattctcgatgcttcggttgccccattcgaggcattttcgcatgttcccattgattgggatacacagctctccactatgcgcctcggttttggggatttggtctgaacggtcctggacccgacagatttttttgaatcagaacaatggcccgatattctggtcctgatccatgaaagaaaaaattcggccagtgacctcggcggcgttgagaacagtcccttctcaggatcgtgcactgctggccttggctgacgtggattttcgaaaggctaaacggcgagaatcccccggaatgatcgcaactcaattggccttttttttccttttttttccttttcccgtttccttttgcgtttttccttcctttctcgcacggggctgcagggggacgaagcgcagactgtccagcgaataggggcttgtagcgggattgccagaactccactggcttcctaaaggagtttggcccatgagctatctgtctctggagctgttcttcgaccgtcgagtatggaggagatgagacaggggctacagagtgacgatagcgggctacggtgaacgggattgtcttgctctctatcttttgcgggataatcaatagctcccacggaggacagttccagaatggaaggtgatcttttctccgatagattatattaccatggcgaggatatggccagaccggggagctccataatttattcgccctttacatgtccgcaattggttcgcgttgtgtcggttcgccttccgcgtaaagcgccgggcaccgttgatgggaagtatacaagacgggaccgacaggattcattatcgcaagccatcgatcgacgtatcgtctctacggatattgtacgatgttcgggagacgagaacgagaacagaaattgtctagatcgcggagactcgcgataatatatcgtttcccgttacctatctccaacggcgcgtgcacgatttcaaccccagccctgaggagattggagattggagatggagatagatggagattggtcttctggggaagacttgccaagggcacattcgccggaaagccggggcgagtgcgggtgcatcaaaagtatgggaaaccagtgactgtacagaatatgtacagactccgtcctgggctgctccatcctaactatcatatacatttcctacatcctgattcgaaaccctgtctccatccaatcgcagtcagccttattctattgtatgcaccgcgaagcttgacggtgtcgatggagggtctgatcgtggaccatctccagtaatatacatccgatgacccctgctatgtacatatgctttcgaggatttacccgcactcgggcaacccgcatttgccatcgtgaactaggtttgtgattgaattttccgttttggccatgtacacaaggcgatcaatgtatgtatgtgctggccggataataatagtagtctccgattgaagcgacgacggacggagtatagtgaactttatcgatgccgtcttttctcgattgagatctacaatatatcacattatacgagcaaacaagattgccactgagataccttgaagcattccgctgaactccgtataaacacccatgttaagagtcagtgcttgggaacagcgtcggcgatcaacaatgatgaaatcatcggccggcgtctgcacacggtgattcgatcaaagccttagtgtagctgttagtgggcctacatggtactgctggccaatccggagcaccgaattaaatgccgcttctggggacgctctccacgaggccagggggaaagagagggcgacgatcgaccgtggtcagagggacgaacgaggcagctgcagcgagggcagtggcagtaggacacggcagtgcgtgctgataccagcagctgaaaaagaaggcccggggaagttcgacattagctaattgatgacataatggtaaggtacagcgcaggcgtaatccgtgggtaagaaacgggtaattttcaacatgcttcaacctcacaacattggcatatccagatctgtcaaccgtttccggaccccttgctatgttaaaatcccatgcgattttggcgtcatcacagtcacagtggcattttttcgttaccttgtgcgtttagtgtttacgggcgaaagccggactcggtcggcaagtcactgaagtatatacatatgtcgctagccctgacatgggcaaatgaaggcatatccgtatcaatagactatcttgggactatctcgggctatgtcgctaaatagagaaacattctcctgcaagggcattcctgctctattcctttttgccaaggccgtgaattctccgtgaaaacacacctaacctgcgcggtatcagaactggtcgtagtgtgtcttttttgctgctatgcttggggtcgcggggcacaccccagacacaaaaatcgcgcatagtgtcaggacccggggcagagacttgcgtaaaattgtgtaccgattttatacgaaagtgatgtctgtggacgccaactcggcagcgcggtgccggtagcagagacctctagagtgagagtcgtatcggtatcgcgtttttgcattgttttgatgctaatccgaaggcggttcctgacccactttctcgaccgcggctgcaatgtgactggctgcagctggctttagctggctttccggtaccaggtttcttggtagggcaaggggtaaatcttggtatcgaccgagattcattacagggctaaccctaaacgggcaggaaaagtggaaagaaaacagaaaaaagtctaattattcccaaaagaatggcccatgagcaggtcgagcagtacctagcttatagcttccccagcaaccaaatccacaggtatctctcccctcaaattgacaaacgcgggatttcgtgcaaatacctctctccccatttattttttatttcttttattttttaattcccaattttgcaaattcaattcccaaattcttttttctttttattttttttattttttaatttccctcactcttttctctcattatccacctacccactccggttttgacccccccgtaatccattataaaacagcccttccttcacccatctcattttcttcctttcctctctttacataggatctattccgactctgtcatatcgccattccgttgttctttctcatatcgttgggttccaaggctgtgtgagccgaaagcaacaacaatggcggagcggagaatttcctatgctgttgatgtcgaaaatggtggtgagcatcgcacccgtgaggctgatgatggcaatctcgacgagtactctgctttgaaccgatacatctccactgcccaaaacaaccgtcgtggctcgacctccagcgccgctggtaagagcggcgatgactccgagaagaagaagccctggtggaagttcggtggcaaggtcgtgggaggtgtcgaggaaggtttcgttacccccgatgactggctcgagaccgacctgcgcgctggtctcagcagcagcgacatcgagcctcgtcgcaagaagatcggctggaacgagctggtgactgagaagaccaacatcttccttcagttcctgggttacttccaaggtcctattctttatggtaagtgacctggacttccgtcttcaggacgcgtttccagccaatcagcccactaacgccttgctctcccacagttatggaacttgctgtctgtctcgctgccggtctgcgtgactggatcgatctcggtgttatctgtggtattcttttgcttaacgctctcgtcggttggtaccaggagaagcaggctgccgatgtcgtggcttctctgaagggtgatattgctatgcgtgctctcgttatccgtgacggccatgaggaggagattctcgctcgtgagctcgttgctggtgatattgttatcgtcgaggagggtaccgttatccctgccgatgtccgcctgatctgtgactacaccaagcccgagatgttcgagacctacaaggaatacctcgccaacaccaactccgacgacctcaaggagaagcacggtgacgatgaggatgatgatattgagacccaccagggtccctccctcattgcttgtgatcagtccgctatcactggtgaatccctcgctgtcgacaagtacatggccgatgtctgttactacaccaccggttgcaagcgcggcaaggcctacggtattgtcactgctactgctcgtcactccttcgtcggtaagaccgccgccctggtccagggtgccaacgacactggtcacttcaaggctgtcatggacaacatcggtaccactttgctcgttctcgtcatgttctggattctcgccgcctggattggtggtttcttccgtcacttgaagattgctacccccgaggacaacgacaacaacctgctccactacactttgattctcctgattatcggtgtccccgtcggtctccccgttgttaccaccaccaccctcgctgtcggtgccgcctacctcgccgagcagaaggctattgtccagaagctcactgctatcgagtccctcgctggtgtcgatattctctgctctgacaagaccggtactctcactgccaaccagctttccatccgtgagccctacgtctccgagggtgtcgatgtcaactggatgatggccgtcgccgctattgcctcttcccacaacatcaagaacctcgaccccattgataaggttaccgtcctcactctccgccgttaccccaaggcccgtgagatcctctcccgcaactggatcaccgagaagtacactcccttcgaccccgtctccaagcgtatcaccactatctgtacttgcgatggtgtccgttacgtttgcgccaagggtgccccccgtgctattctcgccatgtccgactgctcccccgaggaggccaagctctaccgtgagaaggtcaccgagttcgcccgccgtggtttccgttcccttggtgtcgccgtccagaaggagggtgagccctggcagcttctgggcatgtaccccatgttcgatcccccccgtgaggataccgcccacaccatcgctgaggcccaggtcctcggtctctccgttaagatgcttactggtgacgctatctccatcgccaaggagacttgcaagatgcttgccctcggtaccaaggtttacaactctgagcgtctgatccacggtggtctcgctggttccgcccagcacgaccttgtcgagaaggctgatggtttcgctgaggtgttccccgagcacaagtaccaggtcgtcgagatgttgcagcagcgtggtcacttgattgccatgactggtgacggtgttaacgatgctccctccctcaagaaggccgattgtggtattgccgtcgaaggttccactgaggctgcccaggctgccgccgatattgtcttcctcgcccccggtctctccaccatcgtcgatgctatcaagttggcccgccagattttccagcgtatgaaggcttacatccagtaccgtatcgctctgtgtctccacctcgagatctacctcgttacctccatgatcatcatcaacgagactgtcgactcctccctggttgtcttcatcgccctgttcgctgatcttgccaccattgccgttgcttacgataacgctcacttcgaggcccgccccgtcgagtggcagttgcccaagatctgggttatctccgttgttcttggattcctcctcgctgccgctacctggatcatccgtggtaccctcttcctcaagaacggtggtatcatccagaacttcggttctccccaggaaattctcttcctcgagatcgccctcactgagaactggctcatcttcgttacccgtggtgctaagacatggccctcgtggcagttggttattgccatcttcatcgtcgatgtcctctccaccttgttctgtgtcttcggctggctcgcacccgactggaagcagacctcccccgtcgatgccggcggtcctggcttctcccacaacaacgatgtcgacattgtcaccgtcgttgtcatctggggctactccatcggtgtgactatcatcatcgccgttgtgtactacctcctgaccatcgttcccgctcttgacaaccttggccgcaagacccgctccaaggccgacaccaagatcgagaacatgatcgcccacctttccaagcttgccatcgagatggagcgcgacgcggaaggaaagactcgttacaccatcggtgctcgcgccgaggagatcgaggacaacgagtaaacgctcgtcccttagcttttttgcaactcgttactgattcgaggtctaatttctctttttatctccctgcgattacccgcaaattttgccgtgccacctaattgaacatgcatgccgtgggagtcaagaaggtcgagttccgacttttttcgcttccttttacccgtattatagactttgtgtgtttcatttacccccctggctgtggtttgctttcgagttgctagagtcatgtttttattctctacgtgtatgtatgtcgttaatagtggcacttagtcaatctaaagggattctaatcatttctgttctactgtaatctcgtaacctttcgtctgatctttttttgttatgctttcgtctgatcttgtcgcctattgtttgtctttggtctcgactctcccagtctcataggtggaagtaattctccgttccccatattttccccggatgaattcctggagacaagcttcaccgtctctttgcatcatgcatgaagtattgagaagtaccacaaacactcgacttcctactttcaccggattctcacctatcctggcactagtctcgctcaatatgaatctctaattttccgtctcatgcaactagctacgcatctataaactccactccaaatgccttattagaacaaccgtagatcgtgcccatcggaagtaaacaatcacccacacaaccacgatgctcccatacatcctctccctactgtgtctcctcctccacacccaaggagccaccactacccccatccaccccatcaccagacaaacctgccaatccaccggccactgtccaccaggaaccctaatcgtcagccgaacccccaaccacaaaaacaccacgcacccaaccctccaatccgccataaactccctccccaacgacaacaccccacaaacaatcctcctcctagcaggcagctacatcgaacaagtaaacataacccgcccaggcccactaaccctcctgggcgaaacaagcaaccccagagacgcatcccgcaaccgcgtgcgcataacctgggccgccgccaacagcgacagcaccggcgccgtcgacaacgtcttctccagcgtgctggtcgtagcgcccacgctcgaggccagcctcacgggctcgggcgagacggggtatcccgtgccggcggacacgccgttcgggaatacggatttccgcgtgtataatgttgactttgagaatacttgggcggagtactctgatgggccggcgcatgcgttgagtcttagtcgggctaatggagggttttattactgtgggttttattcgtatcaggatacggtgcgttttagcttctttctaactgtgcttttggtcttattgttgagattattattcgttattcgttgggagtgcactattctcacaccaacactaacccccacaggtctacataggcaaactaggcaacgcctacttctaccaaagcatcctagccggccaaaccgacttcctctacggcttcggcacagcctggattcaatccagcgcgctccagctgcgcggctgcggcggcggcataaccgcctggaagggcacgaacaccacaaccccgaacaagtacggcgtgtacatagtcgactcgagcgtgcgcgccgcgaatgcctccgtagcgactgatatccagggcgcgtgtgcgctcggccggccgtggaatagccagcaccggtcgatctttgcgtgctgttatgaggacggcagtgttgatccgcgcgggtatgttgattgggttgttggtggtgttgggcgcttcgaggagggcgttacgcttatggcggagtatcgggattttgggcctggggttaatgtgactggacgggttgaggggggtgttacttctgttcttggattggggggttgggaggcgtataatactccgctgaaggtttttggggatgtggagtgggttgattggggggttgttagggggactgattgagttcgatgggtcttgttggtactagtgagtagtgagattcctgttaaacagtgcttgcttcacttctacatcctaatcgtaccaggctcctggcgcatctccccaatagccttcccctccgacgtcccataagtatcagcatacctccccgccatccactcgtgaacggtaatcgggggatatttaccaccctctgatgtacttgtatctgtatcctcacacccaggaagacaccggatagtatagtttggattccccgagaaaaagaacggaacactaaagcgctccttgccactggtattaatcacgcggtgcagattcgacaagtaccgatcattcgtccagcgcatcatcatattccccagattgacaacatacgccccagggaccggggtgacatcgacccattcagacgagaggttattccagacctgcagcccgcccgtcccatcctgcatgagcatggtgatagcgccgaaatcggtatgcgcgccgattcctagagtcgacttgttagtccgtattgcttgacgaattcacatcctaacacaagttcactaacctctctccagatccgacgcatcatcctcctggggcggataccgaagcagtctaagaatagagacggggtgatcacagaaatcaccaaaagcatgctcgtctagaccgagcgtgcgcgcgagaacttgcatgatggctacagccagctcgatcatcgcgtcgtggtactggtccatgacgcggcgaaagccttgaacgtcggtcacttcggagggatacttattcggtccgtggccgaagcggcgctggacgacgtatgggtcgtttagggggaggtctttgccgagatagaagccttctttgaggtcgccttttgtgcgtttttcgaagttttgggagcggaggcgctcgtagccgcggttgaagccgccgatggctgggggtttagtttctactgccatttgatggagttgggagaggctgtattaccttggttgtatttctcttttgtttctaaggggaggttgaagaattcgtttgagtgttgtaggactgcggcttggagttcggttgggatggcgtggttgattagctggaagaagccgaattgttcgcatgcttgttggatttggtggatgaggtcttctttggttgagtcgttggcgtagaaggctattgaggggttaggtattctcggcatataggatgctaagggcacttattacgggcgaaatcaatgattgggggttcgttaggcttcatcttggaggtagttaggtgtaggaagtgagactttaaagtcttttatagctgtttatacctgatcttggtcttatatcttcgaaatgcggggaattcgttatctcttcactcaattttgtacatgtactttacctatctgtcggaaatccccgctcctgtgcaatgtctgaagggatttttatggctcgggatggtggaaaactgtcggagaagggtctcacagccgctacgtatgtttagtctgcatggttgacctgatcgaattgctagagagatggagaagataagacaaaaaactgtacggtacatgcatgtgtagtacaataaaactcaagggtccgaaagaaccccgagagggaacaatgggtatcatattcgctctaatcaaatgctaaaaatgcacgggcttccactcctgtccgggataggacgtgggggacatgacgatctcctcactggagcggtctgcggtgatggcaagctctactggctgaggtgggttgttgactacacggacccggtcctcactgcgatgaggatgcgcggatatcgcgtctgagatggcgatgttgcgggatgcatggttgtccaaggccgggaataccgagtatgtaaccgctggctttcgggattgaatgctgagccgaggagccaggctttgttggttggaattgcctggtaattcgtgttgttgcccgtgttttgacgcctcggatatatccccgtatagttcgtgtcgaaggggccccccatgaatgtgctccttgtcttcctcatcgtcccgctgctcttggttttggtcttgggtgccttgcttgtgctgctcctctccctgcagttgatgtatttggtggtctggtaactcctccaacggtgactgtggacgtggaactctatcctcgtagaatgacctgggagacggtgaccgggaatgacttgggagaggcgggccgagtgtgccagcagggtgagaccccggggattcattcatggatttaggttgaaactgcgagtaaaaccgactggtcgccagagaggatgacaagctgggtgggcgtggagtcggcaaaggcttttggtcaaatggattgctgaggaccggtggtccatcctgtgtagcgagactagtattcacatttccacttggcgacgggtgcgtcggcgagtatttgttcttcagctgctccgacatggttcttgtgtggtctctcgattttctctcagggtcgtgggagtcttgccggccaaatagtccctgtttaagtcagaaaaaggaaacaaaagaactgtccaagttgacatacgctaattctgctgaaccgtttccgctgacctcccgggggcgcctgaggcccttgcggttgaataccagagaggagatctcccacagaagcgcgtcgtcgtctcccaaagtccttcagttttccaatagtagatcccccattctctgcaggagatcccgatcttgaagcttgtgaaagaccgttagcaggtgtggacgggcgagtgcctttgctattggcgctgcgctttccgaagctaccaaagctcagcatactgcttcggtttgccggcgagtatctgacttcatttctcaaggggctttgcacatctggagcagatggaggtgggccgttgatagattttcttttggcttcgagaacctcagcagaacttgcgaaccccgacgaatagaaaggtatgaaagaccttctcttcacttgaacagatggctggtcatccacagaatgctcaaccggtttataccggggttctggggttacctcgtttgctgcatcttgcaaaggagaagggggatccctgtcaagttcttcgtcagatgtacgtccggcttgctcgtcagctccgagtgtggagacggagggatggcgtctataatcctggctaggtgcaagcccattatcattgtccttgggaggaggtggaggaggttgaggactttcatcaagcactggacggatcgacggggtaataatctccggtgtggacttgcttggctgatgcccccggcggttcgtaaacgggaaaggtacgtgaaaaggctcattgggaatgactggcaaacgattttctacgactggggctttgttcgacagcacggattgattgccagttgggatctctcctggttgcggtattggctgtgtgaattgacgtttcccgccatttacctggctaaatgcattcaacgacatcggtgtacttgccgcccttcggtggtgaggatctgtaggcgaaagaccaagcgcggctatcatctcctgctctaactctccagtaaaggcagacttccccggaacttcaggtctaggagggacaccgctggaagaggacacttgcttcggttgcacagctgtctcgctaacacggttgtacgacgggtagttttcccccgacttggtcgctttgacaggttcgctggaattgtgttcatcctgtcgatctagacagaaactgacccccggtggatcaggatcagagctgagctcggttcgctcagatttgaacatgggtagactgccaatggcgacagaattccgcagagaagagttaccagacacctcacccggccttgaagggaaggataagtgaaagctgcggcgggaagcacttggagttgactgaacctacaacattaccaacatcagaatgtaaacaaacaggggcggaatgttagattgtagcaaggaaagacgcatcaatcgtgtctcattctagagctcaatgcgaaaggtgcgcggaattacatcgtggtatccagaaaatgaagcagcgcagcgatatcgaaagggaaacattaaagcgacggcctccaccgtgcttacccaaataaacgactcgctcaaacgaaaaaaaaaaaaaaatcaggcatctaccttctcagaactgccactgggtcggaacctgcttctgcccttagcaaacagccccttggctgctccggtagccttgccactaaacgctcccgcagtatgaaggagctcctttcctttctccccgactttctccttgttcatcacggtacccaggtggcctgacggacgtcggatatgggtgacactagttggagcaccgtcattcaaggaaccgagacccccaagagcacctagcttagggaatctgatgcgcgaagggtctggcacggtaggggagagattctggctctgttggaccacgtcggcatactctgggtgatcatgaaccataaactctagccaatgattcaaaccagtatcaacggtggcgaactggtcgcgggtgtgttcgaaagacttgatacgctggttgatagatgtgataccgatgatttcacggaaacccaaaagtttggattcatcaaaggatgagctgccggcgttagaagagatatggaggggcggaggtggcgtagctcctggccccatgatttgctccggtggtgtaatgttctgcggaacaggtggaacaatcgaaagtcgaggcctttctacagcacgctgagtagttccttcttcatcagaagcaagcgggtcgtgcggcacatccgacaagaagacgggctcctcacttatcggctcaggctcttgcatagataacgatgtgtctaaaggaggaggcgacgaatagccgccgggcatttgaggcgcctgtatttctgccgaatcagaggattcccacgaaaaccgtctttctaatttgggcttctttagcggatcaacgttcgtgccatccgcgccttgactggtcgcataagggtcttgagacaccgaaggagccaggttagtccagtctggctggctttcggaaaacaactcagcgggtgcctgcgattgaggttggttgctgggcgggtcctccgagggggtggcttcccgacttaatgatcggataatctcctccctcaagcgatcattgtcggtattctggggcgattcctcggctcccatgatggtggggatttcgccatggaaggcgtcagagcccgatgcgcttccgaatttgagaggggcaggcatatcctgcccattgttcgagtatgattgcatcagtgcgttcggaggagagattccctcatcagatgattctggtgagagattctggagtagaggaatggaggataattctgcacggcccgccgttggggtgtcctggtctgtgaattggggcttcctcgaaggactgttgtctgaactaggaaggctcaggtcccggcgatgacctaggtttaacgctggaaccgcattggcagttgccttcggggagtttgactcattcggttcctcgagaatggtaggtgttctttcatcagtcatagtacgactgcccatgatagggctgatcgtcgaagtgccatcgctgttcgaccgtgtgaaactagtggcggtagattgtggagtttctgggacatcaaaggcctgattcactaccgatcggaatcccgtggaggagttgtgatgcaaatagggctcctgagatgcagagctatccttcggcgggttggagtctgcaccacccaagaaatcggtaccaaagctagatacgcgcttgacttcgggtagacccaaatcgagctttcgttgatctgtttgaggtggaactccaaacccgtcaggcttgggatcattgctaccagtgataggatactgctgtgcggctttctcctcgcgcatgcgtttatagaggtcggccggccttacaaagggcagggccttttggtctcctccactaagattcctacctttgttatcagccaagtgcgactcgccggctccgagtccgatgctagacaaacgcctcgaggacaactcggatgagctgccagtgttgcgggtgacatagggcggccgatgtactacaggaggcgcctcctcctcttcatcgtcgtcgtcgtcgctaccccagtcacctccatcataagaatattgcttcgcttccacccagcgttttgttttggagcggttcacgtttgtttggaatgagatcggggttccgctgcctgacgagagcggactgagcacagttggcggggaagggctaaagcaggtcttagtatttgagaactagatatgcgactagatttggataaatggtcttacagttttggggctccatggccctgcgattgggttgggtctgccattagggaacaggatcaaggtactgagtcgcgcgcgatcaccagcatcgactgttgcctggtggtctctgataattttgcgcaagagaaaattgtaagtgttagagaagaatgtgagcagcaacgttctcttaatgatgtgtatggggagagaaaggtggcgatttggcccaagttgggcaagcaccaatcaaataggttgggacaattggatgaaacaagatgtacaagaatgacgtgtatccacagcggaacacaagatcaagccagctatatcaagaagaatagaatagcattagtatcatgaaacgagctaagttgtatattccccctgatctaacgacgtcaaagggctgaattcgggtggcggtgcggggcttatgtaacgcgtttcggattccaaggtttagttacgtggacgaacggggctcattgcgacaagtcgaccttgtggacctcgttggccttgaccctccatcttcttacttgactgtacggagtatatccggtctgctttgttcctggattcaagtcacgttgtacctcggagctctttacctgcaaccggacacgtcttcacctcgccccccttatcgattgcagatagatcacatttcagttccaaaaccgagttcggcctttgtcgacattaatttacatttgcttctcaatactggtgcttcttgaaagactatagctactagtctcccacgcttcacatcttccacatcgcacaatgaccggcccgtcgatacaagacaggaccagcgagttcagcgcgatcttgggccacgcccagaagcgcctggggacatcgaaagttggttcgcagcgccaggcattgttgactgatgcgcaaaggcgacaagccaatgtgtcgccccaaggtcccgtacaggaggcgaaggcggcaaggtcggagttcgcacggcgggcgcgagatatcggaagggggataactggaacaatggcaaaattgcagcgattggctgaatgtaagtctggtcacgtcgctcaaaatgccagcaatctaacgaggaaacagtggcgaagcggaaaacactcttcgacgaccgacctgtcgagatctccgaattgacatacgtgattaagcaagaccttgccgctttaaaccaaaacattgcctcgctgcaggcgctcacccaagcgcaacaccccaaatcgaatcgctcgaagacagaccaggagggagaacacaatgacaatgtgagtgaggcatgggaaaggccgcgcacggacaattcgctgattacccatttcaggttgttgttatgctgcagggaaagctggccgatgtaggcgctagtttcaaagaggtactggaagtccgcacgaagaatattcaagcatcccgaactcgaaccgagaacttcgtttcctcagtatcatccaaatcacacagcgccctcgacgcacagcgctcagactcgcctttgtataacaccgcgggacgacggacacctcagcccggatatcaaggcaactcctccgaccttttgaccctcgagccctcaaacccttcgcccttggggcgtccgtccttccaatcagatcaacaactgatggtaatggaagaaggagaatcgagtaatacatatgttcaagctcgaggcgaagccatcgaagccattgagcgaactatcagcgaattgggtggcatttttggtcagctggcgcagatggttagcgaacagtcagaaatgattcaacgcatagatgccaataccgaagatgtggtcgacaacgtccagggagcacagagagaactaatgaagtattggacgcgtgtctccggcaatcgctggctcattgccaaaatgtttggtattctgatggtatgttcactcaataaatttcttgtctgctcatactaatgaccgttctagattttcttccttctctgggtcctgatttcgtgatagacatgatatctgcccttttttcatgctgtactataatatctggcccgtgtgtttcgacagatcatggcctttctgcatatctgcactcgctgagcattttcatgtcttttactgcctggctagactctgggatgtctaattcatcacgctctttatcttcgtttctacttttttctgtgccctgtgctctttgttgcttgggactgtgtcctcatgagccacacgcgtaaatacacctcaagtactatttgaattcaatgaaccgagatcatgcgataaccatgaatcacttctacattttgaagccagtattcattctatttatatcatgcatcaaactgcgtcatcacattccacagttccgactccgcccaccctaacgagggctgattatcgaacaattcccacacaagactgtcatcccatccccccacagacggtggcgcagtgagttctccggtggaatctgcacccccaagactgacaaaagccggagggttattgtcagtacggccaaatatatctgtgtaggacgcaatattgccctcggtgtttccagctgtgttcgcttcagggagtgcagcttttggctgttctaagcgggaaggttcggggttccctttgaccaaaggtgcacacaggtccaaaaatttggagaatagcttgtacagcttgccgatcgaggcattcgcctctgcgaattgatgtaggtcgccggtgatgtttttgatcatattgaagtctttctcgtttgatgttgcgatcacattgcagaacaggacaaagaacggtgctagaggaaatagcagcattgtcctgttaaagggtcattagtttcgattgtaaggtattgaaagtggctttaaaatagctatatcataccaggtaagaaagtatggataggaatcgatagaattgatgcggcttgagcatgcttcctgtaaagctcggagagtggagagggcttctcgggctgtgtacagacagttctcgcaaaccaggcgagacttgagtaccgaggagcgggcttggatgatggtcgtgagaatagagtagtagttgaagtcaattgatagccattcgcgccgcagatggctccatgattgtgggaattgctgttcttggtgacgacgagactgaaaattgggttagcggttatgctggcggatccttgatttctcttactgtttgcatattggagtggattatttgtgcccgcgccacaagatcagacagtatattggccttctccgtgtctccggttgtcttgttatcgagcaatatgtacagtagagtattcttcagctctgaatactccactatgcctgtcatcatagtagatgttggtagatcagggtcgatgtggatcaacttggttggtttgactttcagatccggtagagacggtggtcggaggagcaggaggctgagtgttttgtcgaagtagtagcacatgtacacactagcgtgaatattttcctctatctgacttcgaggactggtatctgtgatgttgtgatagttcaaggaaacaatcatccgtgacgctagtgctgtcaacatccagcagcgtgtcatgtctcctaaatattgcatcaaacgggtctgtcgtgagtcagaaatgagtcaatgtatataaagccacgtggaagagacaggagaaacatactgcagacagaaccgattgaagcaaaagaagactaggttcagctgcgagcggaatttgattcaaaatctctgtggcagctacttcataccttttcttgagtgaccgaaaatgatttctcaaaggctcgcttataatgagaggggccatttttgatatacaaatcatggccttcacccagacaatgatccggtaatgctggagcacttgctcacattctgtgccctcgataattgcaaggcccatttgctctagtactttgtcggagatgtgatcaggccaattgattgttccctgagagttggttttcttatcgggtcctatgatgatcagtatcactgacatctgacccattctcgaaacttaccaggtagcatcatgtagagcaattccggtgtgagagtaggtggttgtatggtttcttgaacatccatatcaggcatagccgcagtctcctcccaatatagagtcggattggatagctgactgacgaacttgcgcgctgattcaagtgccgtgcgtctatctttcgacagagcagggttgcattggagttcatgctcaatgtactctctagcctcactcgcgtgatgtgttgagccaggagaatgtgcctggtgcgccacactctgagacttgcggtgcttacttagtggtgcctgcagggcagctgtgtcatggggctcatatgctcgatatcgcttctgattgtcgttgagaacttcagtattacttgttaggttgcccgaaggcgaagaagacgttgtgctagtggcgtaattccttgctggaaagtatattgcctctttattgcgtgactcttctagcctcgccaacctttgggacaatgtctccaatcttgaaatgtcagctatagattttaaagacgcgcatcgtgaattgcacgtaccgagagacccgtggtctatgaactcgtgcctggcgattgcggagacattctgcacctgcatcggtacagttcatgcaagggtcctggcgatcgcatttcacctactccatacaatgacccgagataagcatctgtcaaagaatcatatgtgaaaaacgaatggttataccttccgagtatgacataaatcgcactggtagccgattagctgagctacattatgtttgttttagaaacagcctatgcctttcgcgacgacattattcaggcaaacttaccgcagacatattgatctcggaactcgcaacggaatttcggaatcaaggtatattaattaagcactgggggagagaaaggtgtcggttgaagttgtgtgctcggcgcccgaactgccgggaaccgagcggaagcggtttagcgcggagcttcatctcacaggcgcgatatattttcttattagtattatagctagaaggataagaggaactaattgtatagtatatccaagagtatatccaaggcgaaaggagtataaaatgtgatttacaatttgcattgaagacttttgtactattccaagctatcattcgtcataacaatcatagcaatattcacattccaatctcacaatggacccgtggagaacgtgcaattctgagtcctgaacagtatgcggaatagcccctcgtcggtccatctcattttgtgctgcttggaaccatatatggtttatttttggctcgaggtctgattgttcgccatgatcaccgagagacgcattgtactcgttcagatcccatcgcatcgcccacagaaactcctttctatgagaccacgtggaatcatgctcgccctttctttttctttggttatccttcgcgatggaaacaaagaagctaacgattctctccatggtggaagtggtgagaaggagactaaaccagcttttcgcggaggaatgggggatttccgggcccatcaagcgctggaccgtcgaaaatagaagttgcatgcagtggtgggtcgacagaaatatatgtgtatcgtcaaaaggcgcattacggagaattgattgctgtctttcaatagaagatgccatatttttgtggcgatgacccgagtgatcagagtcagagtctgaagatgcggatgattctaagaagaatactgcgtaggctctatattcgagttagtaagcttccaagaaatagtacagtggggccatacatcggatacaaaagcttggcctggagcgaggctacagctttactgtagacaacttctttctctgtttgggaagacgaccacaaatgctgcgcaattgtactggtctccagatgatgtgcgaccacatgatcagccaggtggtgggagagtcggatgcaagtattccagcatcgtttcagatcgccgagataccccagagaataactagcattgtcatgagccacgcctttgctataatgaggaggtggcggaggaaatagctcggagacgaaggcaatatcatcacccggcgacaggctgccatcaatacaatggcctggatgcttctgttttcggagttgaatatatgcccatgctatggcaaattccagcttagaaacccggccatggagcgctcgacaggaaagagacaaagacccaatatccttcagatcacaggatgctaggatcataacaaagatatgagatgggagccgctcccatcccgaagctttggacgctttcgacccagctgacatcgagccccgtttaccccttcgaaggaccgttcggactcgatggataaaatgcgtatgtgtcatagttcatacttttggtgaattatttgagatattctttcatgtacctccgaaatctttgagatgaaaccgtaaataagacaaatggatgatagaaacttagatggaatggcttcagctgtgatttgagtgtgcccagactgtaaagacgcagttaaaggaccgaacagagtactgcaaaaacaccatttgatcctttcgagcgaagatgtggagtttgaaacaaccgagattgggatgatgccggtgatgtggacctcatgccttatattcaaggcatcaggatctcacggacatctgccttcccgatccttgtcctttcctctcctcaataccaccagagatcaaattgcttaatcaagcatgctagtcatcaatgtctagctgggttgttttccaaagagagctgcagcgatggtttgtctaactagctccttggatggtggccgggcaatggactcgccatccaaacaacccgcatcgttcgcatgcgtggtctgtcacgatcggaaggtcaaatgcgataaacaagacgcatgtagtccctgctcaaattgcgccaaggcgaatgtggagtgcatctaccgtgctccaccaccgcctcgtcgcaaaagggaccgagggacaaatgaaagtatgtctcaaggacgcggaaaataccttagacgcaacacggaattcgaaagaaatccatcattcactcagaatcatcatgattctgcggagggaaagcaacggattgaagcagggaaaagtggatctgggaggatgatcacgaaagatggcaattccatctatctcgacacgtgagttgctttgcgctgcatttgacctaatgtcaaagttgaagttctgacttgcacatcagcgatctttggaccagtgttagtaatgaggttagtattttctgactgccgcgtgctgtcgatgctgaccatctttgctagctcccaaatgcagcggacgtattgggggatggatcggatggtggtaccgatgacttttcccaggatgtgagcgacgattatgcgatactatcgacatctgcaaaaagagacattctcatagaactccacccaagccccctgaatatcttcaagttgtggcaggcatttctcgagaatgtgaacccactcaccaaaattatacatgccccaactgtgcaacaacaaattttggacgctatgagtgatctaccaggagtaagccgggaggtcgaagcattgatgttcgcaatatactgcatagcgttgatttccttgcaagcagaagatgtcgagaagtcattcggagaaagcaagaaagccctcctatcaaggtgcagacgaggagcgcaactcgccttcaagaatgcatcgcttcttcgcacatcaagctcagtggttctccaggcgttcatgctatatttagtatgtctacatttcttgagatctaatccctttctaacgatgtttagctctgcatgcgctcgttctctgacccacatactgtctggacattatgtggcattgcagtaagaatcgcgcaacgaattgggattcaccgtgacggggctgcacacggactttcagtattcgaaaccgagatgcgtcgtcgcatctggttccagctcatgatcatagatggcacatctgcacagttctgtggtgtagcagcatcgccgctcccaaccacaatcgatgtccaaccaccaatgaatgcaaatgatagtgacctcgatcctcgcatgacagagccagcctatgagaagccaggaccgacagaaatgatgttcgttctggctcggagtgcatttggaaaatggctctttcgtgtgtcaagccaggctgagaattctaatactgggccatgggccttcttatcatcgtcatcgatgcccttgaaggacaaggataaagcaattgatagactggaagcacacatggaagatacgttctttcgacactgcgataaatccatcccgctacatatagcaacgacaatgatggcgcgttcagctatatactatacccggctgatggcacaccatcctcgtctatacaaggatcccaacaacatctcccaggcagagagaaggatcatcatcgagaattccctcaagatgatagagtatgctgactacgcccaaaacaatccagtcgtacggaaatactcgtggcacatggtgaatcacatgccatgggacgccatcatattcatgctcacggggatgcggcactggactgattccgaggagaaagacaaagtctggcaattgattggaaatgtgtactctgggcatattggaacgatgggcaagaacgccccaacacctcttcacatggccattgagaatttaattgtcaagacctggcggaagtacattgacgagtgtaacctcaaccaccgcacaccaacgccttgtccaaccatcgttgaatccttgctagccaaagcagcaggaatttctagtttgcaacagaaagatgaaaacttagaagctgtcgagcgaggtgttagaccacaagatcaatccaggcacgaccgttctagttcacaatttggactagatgccgaaaacttcgacttcctgcttgatgatggcccgaagacttggaatgattgggacaatcttctcggcaacttcgaaggttcttttgcagatgatgcaacatatttgtcgtgacatacgacgctgattgctcaaagttcgtacacccaccatttctagcgaatcaagatgtatggcagcaatcatcgtattcgaaatccaggtggaccccaagttggagagtcttgcgtgccaaggtacaccgagcatatagtaaatgcgatattttacgaccttatgtctcaacagccaacgctgttattttatttctgtacttgtcgatagctattgataagcatttttagtaatatatctcaatttctaataaataagaaaatgtaatgttatagtcaaaatatatgtacgatgctatgagctaagaatatatatatcctcatcactacacagttcattcaagtttccgaattccataaagtggatagatataatatgaaaagcattagtccacaagaaaaagtcaataatagctacatgtagatagttagtgggtgttgcgatatcatcttagcattactatgtcttagtgtctagctcgcatgtgagatacgtcatatgaaaagcttcattttcacctgctaagttgaactaggtaactattgactactccgtagttaacaagttcgataacagtttgcttattaagtctctgatttggagtcccagtctaagatcatcttgaaaacgaggcgctggtcggtatacatcttcgaactcgcgccgatcggcatgcgacgctccgatgcctccacgtgtcttggcgtctgcgatcctcggggtcggcgactaaacagccgaccagcgatgatcatcaacattttttggagtcatgtctttacacagcgctggtatgtgcttgatcaaatttctatttaaagtcgcgttccgcgcggtgccgattttgaatatgactaccaatttcccacctgcaatcgcctgagcacggtattctgccatcaattccacctacaaaacccccaaagatcgttccaagatgaaacccaaaacggatgttctcattgtcggcgcaggcccaactggccttgtccttgctctgtggcttcaccatcaaggtgtcaatgtccacattttcgaccaggcggaggccccggcgcagaactcccgagcgatcattgtccatgcgcgcatagtcgagctgtatagacaacttggattgagcgaagacttgctgaaacttgggtacaagctgccggccacgaatctctgggtttataggcagcgcaaagcgcacgtcccgctggaagacttcggtcgcgatttgactccgtacccgttcatgctcagcgtaccgcaagacgaccacgaaaggatgctcgaaaagcgactgaatgacgtgggcatccatgtcgagcgagggtcgaagttgcaaggctttgtggaccacgggtctagcatcactgccaccttgttccgcgaatctgatggcagctcaaccacacacgaagcatcgtacatagtgggctgtgatggggcgcactcggttgttcgccacgggattggtgccaaattcgagggcgaaacgtacaaaccgctgttctatatcgccgacgtcgaaggcaaaagcgagaagcatttcaacggcgaagggaacgtggtgttcaccaacgacactttcaacctggttgtcccgtacaacaaagccggccatgtgcgattggttggtattatcatgccggatgaaaacgacaatgacaactctgaatcgctagtgcatcagcaccagatcacgttcgacgacgttcgaccccagatcatgcaagccatggatatcgatatcaccaaggtcaactggttctccacctatcgcagtcaccaccgtgtggccgacaaattccgcagcaatcgggcattccttgttggggatgcggctcacatccacagcccagtcggcgggcagggcatgaataccggtatcatggacgcgatcaatttggcgtggaagctcgcaacggtcctaaagcagacaaacatgagcgaggatgcacaaaaccagcttttggattcatatgagaacgaacgccgcgcattcgctatgatgatagtcaagtccaccgacgcgggctttaccacgttgacgtcaaaaggaatcttcccacacattcttcgaaattggctgattccgtaccttgtgccactgctcttgaaacttgattttgcccggactagaatcttccgcggtgcttctcagctcgtttgccactataggggcagcagtctttctcagactggagaaggggccgtgcagcctggcgaccgtctcccatgggctgcaatcaacgaggtggataacttttcaactctgcgagaagtctgttggcagctccatatctatggcgaatccctaccacaaattgaaaagtgggcccaacagacgagtgtgaaggtcttcgtctttccctggcaggatcaatatgccaatgctgggctgatcgagaatgccgtttacttgctgcgacctgatcagtacattgcagggattttcaaggacccctctgttgaggggctgaacgagtactttgctactcgggggttgtacctaggtcgagactagactgtaaataccagctctctccactatccagttcatcagcttgtaccctgagaccacgtgcattgccctcgcatgttaccggtaatttcccgtttgagatgcggaatatcatgtacatttccaatctagtcgactcccgaagtgcaccaagtcacagcttgtgaacgggacatgggggccacatggtctgcacacccctacggcatgccagagaaccggagtgtgattggtgacttggcacatattaaagcccgttgacgcccgctgtgattggtgtacctgtggggctaaccatgttcccctactggggtgggtctgtgggagaccccacctatactttcgcagggcattctccccggcactcgttctatgtggcatccaatctgtatacgacaattgataattaccgacagcctccgagttgtttcaaactccacctatgttgtgtcgggcatagtcgcttacaccgttgatcggccgctgagaactccccgggtgaacatgtggcagcgacggcggcttctcatttgctcgagcgtctaattccaggtacagggctcgaatgccaagcgtctctcctgatgcattggcatgtagggagggagatataaaagccttgcgaccaccgagggaaatgatcttcgtactcacctcagtccatctctctctaccacacttcccggcacgatgaagaccaccgctctcatttccctgatcggcctgtccggcaccgctctcggtgccgctgtggacaagcataccagcacccccttcggctacaagcctggctccaaggagtccattgccaacatgaaggacaagattgagaacgttgtctggatccttctcgaaaaccgtggatttgacaacattctgggtggagtcaagaagcagggtctgaccaacgttgtcaacaacggtcctttctacaacctgcagaatgtcagcgacccccacagcaccaagtggcccagccagtacaagaactacgactcggtgatcaacgatcccgatcactcgctcactggtaccaacttcgagctcttcggccagtacaaccctgacaatgccgccattgccaacggtactttgacccccaacctgtctggctttgtcgagcgtcacatgctcgcccaccctaagatctctgcccagcgtgctgctgacgaggtcttgggatactactccgagagccagatccccaccattgttgacatggttgatgaattcaccaccttcaacaactggcactcttgtgtccctggtgtaagtaccttccgtggtgcacattaaacaaacatcaaactgaccatcaattagcctaccaaccctaaccgtctctgtgcggtctccggtttcaccgatggccacggaaagaacgacaatgatttcgatgtctccgccatcgagaccggcagcatcttccagactgcctctgagaagggcatctcgtggctcaactacgacggtaccaacggtgccttcctctccgatgccatgttcttcgactggaccgcgaagaacgccaagagcaacgtcgttcccctcgagaacttctaccaggacgcctacttgggcgtcctcccccagttgtcctacatcaacccctcctgctgtggcctgaacaccaactccatgcacccctccggcaacatctcctacggtgaggtgttcatcaagcagatctacgacgccgtccgcaccggtccccagtgggacaagacccttctcctcgtcaccttcgatgagactggtggattcttcgatcacgttgcccctccccttgccgtccgccctgacaacaagacctacaccgagaaggcctacgatggcagctcttacactttcagcttcgaccgtctcggtggccgtatccctacctggttgctctctccttacactcccaagggccacgtcgagggatacggtaccgaccccgccaccggcaagactacctcttacagtgctacctccgtgctcaagaccctcggtctcctgtgggatcttgaggacagcagccctcgtgttcagcactctccctctttcgatcacctcattggacctcgcattcgctcttctccgaagacccttgcgaacccccacatcttccccactgatgtttaagaggtgctcctacagagtggcactggcttgatgagattaatcttccgcaagttggagcttatagacacgcgctgcagattttgcagccgattttctactagtctggttgtttctagttgtttgagtacagtcaaaatataatacaaaaaaaatgtttttaacttcttttcaacttctttcaagtgtctttccagatgttcttagttatatgtctcttgggataataagccgaaaattatagagcatggtgaaaagcacaactcggacaaggctgttagttcagagaaagttcagcaggaatcagctactatattttgatcagtatctcagcttttctatgccattcttggccaatttcttagtttggccgagtggagtggggggattatttaaccccgacacgattcggcagaataacttggctttgtatacatacttgatccttcattgatgtgagagtaaatgtcttgaactccccttgaagctctttcgcaatcaattctagagtacaagttattttatcatagaacacagcgaaaattcaagagagaaatatgcaaaatatacaaaagtccggatttgtgcctaaggcatcaaccctaaacccaattgagccgtcgatctggagattctcgaattccgctccgagttgacaatcaatgaccaatcttccctacgagttctcctcacccacagcttcacaacaatcaaaatgccttctcctataagattggccaatgggctcctaacccgagccacccgcaatatcaccctcgaatccgcctcaacacaacgcatcctccctctcctccgaagcaacaccgcaccacaatgcagagcctacacccaagcacagcgtccacgatgcgaccaaaatatgcgcgccatggtctccacacagaacaacttctcaacctccgccttccgagcaggccctaagacaatgggccagatgcgccagcgcaactcgaccggcccgttctcgtggaaggccgcactgctcttcgtcttgaccggcgccggcatgatgctgtacttccgtgttgagaaggcgcgtctggagcgcaagcgcatgacggagatgagcaagggcgttggcaagccgaaggttggcggtccgttcgtgttgaaggatcttgacgggaaggagtttacggcggaggacttgaagggcaaatacagctttgtgagttaatccggaggatggaatagagagcatcaatggattcaatggattcaatggatttgacatgttggaacggtactcgctaacacgatctcgctttatttcttcaggtctacttcggcttcactcactgccctgatatctgccccgacgagctggacaagatggccgagattatcgagaaggtcaaggctgctaccggggatgagaagatcttcatgcccgttttcatcacctgcgatcccgtccgtgatacgcctgaggtgctgcgcgagtatctgaaggagttccacactggcatcgtcggcttgactggtacctacgatcagatcaagcacgtgtgcaagcagtaccgtgtgtactttagtactccccgggatgtgaagcccggcgaggattacctcgtggaccacagtatctacttttatctgatgggtgagtgctgataagaccttatacataaacgtatgctaacctttatcatagaccccgacaatgacttcgtcgagtgtatcggccgacaggatacccccgagtctgcatccaaggtgatcctggagcacatcaatgactggaagagagaggggaagccactcaagacggagtaagagtctcgcgtcaggtgtatgtatggaaattgtacaatagaatcattcgaatatctgaataccctactcacgccggaaccgtgtcccaatgttcccgtttttcgtgcttttgctcgtatactcgggtattgcggccaagatccgtcgaatatagaggcccagaaaccaattagttttaggttggatgccacctgtaaaagataaaatcagcattacccacaagccacactcgagaataccaccaaccagccaccaaaaacatccctaagcccccaaaaccctcccctcagcatccctctccgcattagccctccactccatccccccatcaacaaactcctccctcttccaaatctccgccttctccttacaagcctccaacacctcctcaccagccctccacgccgcaccccgatgtcccgcactaacagcaatagcaatcgaagcctccccaatcggcactgtcccaagcctgtgcgcaatactcacgccctccagcccatgcgtcttcaccgcggcctcggcgatccccgctagcgtcttcagcgccagaggcgggtacgctgtgtagctgagctgcgagacggagcggccttcgaaggtgtcgcgcgtcgtgccgaggaagaggatgttggcgccggcggcgggtgaagatgtttgggataggtaggtggttgcgtcgagggtgttgtaggttagtgttatgtggatgttttgtgttgtggagttgtgggtgcgtgggtaggtttttgggtcgaggtgagctgggaggggggttgggtcttgggatggcattttgggcgcgttgatttgggagttcggtataactgggttgaggaaatgttgtttcaattgtggttggaattggcgttggagttggagctgggctgttctgttccccctcgatgcttatctgctgcggggaccggataagaagtgtcccccgatttgcggagagcaagtcgtgggagttgacagcttgtctatgttggttctgtaatctggattctatgcttggatgtgttcacgtctcttcatttcaggaaacagtctaggtacaatttatagagtatgcggaaaatggcttgccttgtggccatcctcagctctcatatcaaacgagcaatacaacagcctcaaagggccgaagtgtccacttctcaccggagaatcgcttggaagcctcctcaacaccttcataagtattgagcaagacctccttcacgctggtgataccgttgctcgccgcatcccactctagagtcttgtctgtccagtggcacacaaccaaggctttttgatcgccatactggcgagtgtacgcaaagacctcctggcttggcttgtccagaagtgtgaaatcgccatacacaaagatatcaaggtacttcttgcgcagcttcagcacagtcgcccagtaatggtatgttgagttggggtccttgatttccgcctcggcattgacccgcacataatcggtgttgatagacatccagggcttgacgccaggtccggtgaagccggcattctcagcagcggaccactggaccggggtgcgtccgttgtcgcgagacttcttctgatattcttgcagggcaattgcttgggcagcaaggtcgtccttgggtattctgtagaatactgtcagctaacgtccacgagttgcactaggaaagtgtcattaccttttccagtggttcagacaatcaatgtctttgtattcttcaataccccattccttgggcacatttcgggttcctatttcctgtccctggtaaacaaacggagtaccagcctgcaatgccagcgcagtagccagcatcttcgacgcgaccagtcgatactcctcactcgcatgcgcgaagcggtcaatagagcgtggctggtcatgattctcccagtagagcgcattccagccatcattggcatacataaaggtctgccaccgctcaaagaagtccttcaagtcagtgagttgccagctgccaggttcaaacttatcaagcttgccatggtccaggtcaacatgttcgaaattgaagatcatattgatctcatggcggtcgaattgcaccgcacgcagcacttccttctcgtcggtgacgaacggcatctcacccacgctgaaggcatcgtactcctggagaatcttgcccagatcctggaggtactcgtgcaagcgcgggccgttggcataccacttgtcgccccactgccagggtgtccgcgggtccttgatgggtccgtcggggaatctctggtccttgctaatgaagttgatcacgtccatgcggaacccgtcgcagcccttgtcgagccagaaccgcatgatatcgtgcacggctttgcggacaggcgggtgttcccagttgagatcgggctgctcgactgcgtacaggtgcaggtagtattcttgggtctgctcgtcccattgccaggcgctgcctatagtcttcattagatggatgtaattaaccgacgatgataaagtacgtaccctggaaatgagagacccagttgttgggaggctggcggttgccttgttcgtcgtacttagccggcttccagatgtaccagttacggtactcgttatccttggagctgcgcgcctgcttgaaccattcatgctgatcgctggtgtggttgacgaccagatccatgaggagcttcagaccccgctcatggcatccggaaatcaatttttcaacatcttcaactgtaccgtactcatcggcaatgctgtagtagtcggagatatcatagcccatgtccacctgcggggatttatacgatggacatagccagacgatatccacggcgaggttcttgatgtagtccagcttggaaatgataccggggatatcaccgataccatcatcatttgaatccttgaaggatgcaggccagatctggtatacggagctctctttccaccaggcacggtggttggagtttcctggtgtagccatggcggtttgaatgcggatgacaattaagagatgagattaggatattccgagagggagaagagggatttgggattctggagcactgctggctatatatatgtgttatttgctgtaagagatgtgttgttaaggtcacttgaagcatgtcccaccgtggggcagatgcggacaattatcggggtcctcagcgtttgatatgttctatgtcggcccgagatcccctcaacgattgatacgtcgtatgtcggcccgagatctctcgacaggggtgagccgacggagtactctgcatgggttgaatcagaagccaaactgctgtggatcgtctccacctagatgacatgggactaacgatgatgcaactggactggatgggttcttggcggaccatctgattcatataaattgataatgagaagtagaagtatagttacttgttaagacatcaagtaaactactgtttccgaattgaaaattgcactgcatacttccatcatacgatctacaatctctacatagatctcaacatcattgcatggtacaaattcccacctagcgggctttacgttgaattccaagcattgaattgagcaagtctgccttatagggactaatccgggaggtttctggaatcctgtgaatgttacatgttcgccttgagtcggttgatagaaaattgggggttattttcgtcaattcagctagatctccaagccgttctcaaaacatccggagaacgaatgcatatagaatgcagggcaagccttcagaaacgccgctatacctcagacgagtagaaacgagtcaagacgaggtagaaatataaagagacgagatagaaacggcgaatctcaaggcggtgtgacggtaaatatagcggaatcgaggtaaatcgagagcggtggattggccatgttatcgttatcgtagcttcgattattccatctccggcttttgtaggcgatcctttcgctcagttctccttttaaatgctcatcaaccatggcgcctccgtaccggaatgacaggttttcttctggctcatctaaccgaccgttcccttcgcgaaatgatcgcgatggccgcatgtatgatgatcgatcccggtctcgctcgcctggtaagcttctccccgcacgtcaatggtgttaagcccatagacgccttcggcacgggcccaatttctccacatggtattgaatcgtggctaactttattgtcatttgaatcgatgaataaaggtggtgcacgctcccctcctcgaagactagcggccgacagcagactcgagtaccccagagaccgagaatctggacaaggctaccgaggccatgatcgagatgataatcgccgtcgaacctcgcgctcttctcctcataggggcagaaacgcgtacaaagaccgcgatcgagagggttatcgaagcgcgagcggcaatcgaagccgaagtcgcagccctcgtcgaggtcagccgaatatgggacaggtgagccgagaagtgatgatggatggacttccggtggacatgaccgaagaagatgtgagtcattaaatcaatgccctgatcaggcgttaaatatctccatcgccgaggacaaatactgacaatgcgctctatcatgtgcaattagatcgcgactgaactcagcaatgcctatcatactgacggcctggaagatattcgagttattcgtgaccgacaaacgagtatgtgaaagaaacagaccatttgcaaacatgcgcatcgttttaacctgatattgtgtccaacagagttgtcgcggcaactagggttcctgcgattttccacgattgacgcatcacgcgaatttgtcgaacgcaatcatccttccatctttttctacggtcccacaaacgaccgtagtactcaagttcgcatagcttacagccgtgagagagaagaccgagctcgcgcaaaaggtgcgagtgactggaactgcagaaaggtaagttaacgtggtggggacaggaaacatgctttcctaccccagacgtacgcaattactgttactgttctgtgcttaccaaaccagtgtctcgttctcaacttttccacacgtccacactgtttcaagtgcggtaacccacgacccggtacgtataccatcctccacccctcaattctcatcaacactaatcatcctcgcagatatggataacggtcccccaggagttccgattcctaagatagctaatgatggtgacaatgatgtcgctcctgagagccagccttcccaattcttgctgatccgtggtctggaggcgtctgtcacagaggagcttcttgccaaaggagtttctaaactctatcggccggctgtcaacaatgacagcgccactgacaatcaaaagaagggatcgaagatagcatcgaccactggtgacagcaacttgggagctcgcgaaggctctctccgccgcgtgctccttgtacgtgatcgcagaaccaatgaaagctggcgttacggattcgcagaattcgcgggaatcaatgtacggttatcattcatctctcatattgtttcctcttctaacgcttgacatttcaggatgcacaagctgccatgacgagactcaagtctttcgaaaagtttaccatctcctcaaagccggtgttggtcacctacattcacggtggagtttttgttccagtcatgaacgcctcatccagtgctagtcacttcacattcagcccatctaacaacccatcgctgaagttgatgtactgggatgatgcagcatacgtgaaggaactcgtgctgtcaacagaggaagacgatcctgtagccaacaagacaacttccaaccatggagacgtccaagccaagggcacgaaggacgataaaggcaaaaagagaaaagccgatggcccgcctatttcgaaccccaagaagcttgcaatgccatcccagctccaattctggagtgaccgccacgctgagctacatgggattaacagaaatgatgccggaaaccccgcagagggctcgacctccgcaactctggcgactgactcggccgctccaccagctccatcattcgcagactacaaccagaaccgctgcctcctgtgcatgcagcagcttgtggatgcgggtcatctcagataccacgagcgcactagtgatatccacagcgaaaacctaaaggatgtcaaattgagggaactcggcgtatgctggttgatgatctatggtatcgtgccgttgcctactccgaactatcaagacagcaaagacgaatatcgtgacggacttgaacaagaatactccatccctccatccgctcgatcctttgcagacctgaatcggaactggtgcctgttgtgcttcagcaagtttgatactccggcagaggtcctcgtgcatgaccgcgtcagtgaataccaccgaaaggaattgaaagatgaagaggcggtgaagtggggcttgaacaagcttaaagaggcggatatcgcgcaggatatcgcgccggcggctccagaatatagagaccgcgcaaaggagcgtcggaaggcgttcggacgtaacgatgccaatgcccgcccgagaccctctgaaccagaggaagaggacgagacacccgttcagacatcctcgatcggcgcctctcttctcagcaagatgggttggtcggaaggatctggccttggtgctcaaggaactggtgtgactgcgccaattgctacagaaatctatgcccagggcgtcggactgggtgcgcaaggaggtcgactgggcgatgcaaccgaggaagctggtcggaacactcggggacggtacgatgaattcctggagaagaccaagaacgccgcacgccagcgctacgaggagatggaccgatcttgatcaattcaagacggttgaatgtacaatagggtggaagtggtgggggtggttgggatatgaattgaaagtgagggggagatatctgatgttcaccttgtgccataactgggcagccgattccatgtatgattacgacaactaatgaacttgtacgatgttcctaggtagttgatttcctctgccacttcttggctatccctttccgctttagtgctcaggctttgccgctttttgctccctgaattccaaaaagcgctcatgagtcgtagtaaaagggaataacttggccaagtcggttaataggccttggcatctcggtcttttccgttcctctctccttccacttaaccgcgcaaccacacatctcacctgcaaaaatggatgagctccgtaatagacttgacagtcactggactggtgcccatgtggctaatttgaaatccaggaccatgttgcctggtagggggaatagggacacgttgacagtttgcgagctgttgagcgaaccgtgggcttttgactctgtggcgttttaatgaggataatatcctcgtgtgcccctatttctacctttcaactgacaaacttttccaacttctagtcattctttttttggatattgttgttttaaatcactttctttgcatcatcagtcactccttaaaactgttcgattgagcaaaagaatacgacaatcaaagatgatgcgcttcgtgatttctctggtcgtctcgctcgcttcgcttgtcgctgccattgaaatcaccagtcccgctgcgaacacgacctacgcagccgggtccaccgtcaacgtcgagtggactagcgttgataccgatcctaccaacttcagtctttatctctggaactttgtctcctggcctccatcttatgttccgctggccatcgacgtccccacgtcggatctgtcttactctgtccaaatcccctgcgagaccacccccgactggggttaccaaatcagtggtatcaacggcacgaacgtctacatcatctacgcgcagggtgagaagttcaccgtcgacaatgccgacaacagcaccgcctgcgtggacactcctttgccgactacatccatctgccccaacgctgcggcatctaccgtctatgtcacggtgagctctactcccagctcccgtcctttccatcatccatcccacgcccatcatctatcccacgtccatccttctccatcacccagcactgccagcatcttgacctctggatatacaaagcctggaattgtgcctaagactataggttggtgctcagactattcccaccctgtaaccttggacaaggttcccgccccgactccgactctttcggctcccaacgatacaaatggatctgatgcttcgccggtcttcactgcggcactggaccaggtcactgattcccctggcatcctcacattgactatcactaacactgcgaccgtgctggcttgcccgaacgtgcacacaatttgatggaagtttatccgagcaaccggtgaccagtccacttctttatgtcgatgtatgttatgtagtaccgaacgagaaggaatttatacatagtagatcgaaatcaatttcccccttgtactttttaattgtttctcaaattctgactacattgagctgctcactgagcttgagcccggtctgagctttactcgctgagtcggactctgagcgccctcataaaagcggcggcagccaatataggaaagccctacccggcaggggaaacactacgtagagttacctaggtagtcatgctggcacccattcgggtgtctttccctttccattgtaatcggcaagccatgccgagtaaataaataatgtacagctggtatcaaatcatgagtagagtgtagtgagtgtagttggtatgtgcaagtaatttttgcagagtccttcctcagttctctttcgtatcctggttctcacggaacgccctcttcatcttctccttctccaactgcttctcaaacttatcaccgaggatcttagcaacccactcagtaacgtccttctcaagctcctcatcactcttcacaggcgtatcactaccaccctgcaacccgttccgcacgaatctccgcatatcctctagcccattaatattcaaagcatacccgaccgcaccgcccgccatcaacccaaacgagatcacattgagcgtagccaaattcagagcctcgaatgcgtcgcccgcggagttcgcgtgcggctggtggtacaccgagcttgtgtggaaaggcgggatgcacgcgatgcgtttcttattgaaggagcggcgtgtgattaataccgacagcgcgaagaacgtcattcctccgaagaaaagtttgaggtttgtgtttgtttgcggtgagggtggttgcgctacttgtgtttgggctggtggtgatgggttggcgggttgatcgggtgtcgccttgtcttgaggtgttggttggggagtctcgggttttgggcttgagccccagccgaatagtgataccatttttatgcgcggggtgtgtgagggcgagggttgtttggttggtgatgcgaatgcgaggcggagctgaataagctggaaaaggatgaaagtcgaaggatcgggagttgtagaattcaacagagaggatgactgggtatgatatttttccgcgaagataactcgaagcactgtatctgtgtggggttgtcttgctgttctcgtgaatgaagcaaatccgcgcggaggatatggcggatgtgcacgtgacccggttctcatcgaaggttccaaagttgactgccttcacgttacgacaattttgtggaaatttgactcatacttcggtgaaatgatgccgttgctttcagatagacagcacgcacaggaatatcccgttccggaactatacgaagcaatgaatggctacatcttagatgaggccgaatgagaatggaagtttttagggctagagcgtcggctggctcgggttctgtcgtccttgtgcaagtaagtcagatggaaactgtcgaccaggctgtcattaaacaaattatcttctctatgtatcatcaaagcataacgccaatcaaatcggaagtatgtaaggtatgcaaaaacaccgtggatgcaactgtcagaataacaatagcagaaaccgaaatccattcaaaccatttcaaaaagcattctcatatgttcataattcagcgcgcttcgtcaatatactgtgctcatagaaaaaaagtaaatcatagtaacatcataatagatgcaatccaaatcgtcaggaaattaattcatatcgccggtggtgataagcatatcagcgcgaccaggccgatggaaccgatcaataccaagatgctccttgccatcacgaccgacataaatgccaaagccgtacaaaggcaggtggcgctccgagggtggagcaacaataagacgagtaacgaggtcagtcttgctcctgggctcgcgcaagattttatcagacagaagaggcgactggtaaagatagctcatcagatcagccaaggttgtgatatcgtgtgggagatagcgacgacggcccggccagattgctatgaaagatacggcatataggccacagaaggcaatcaaagcgtagaatgctggcaaataggcagcgatgcggatctggtcgtggtcggagaaccagagggcgatgaagacgcctccggcgagaatggggatggcgagagatagcaggctcatgagggagatccaggcaactttgaagtggcggttgattatggcctggatggtgacctggaatgggtaggaggatgggtaggagagtaggatgctccgttcggcagatgcgccgctgggggatgagagttcggcgtatggttggagagctcggaagtatacgtcgacaggttgccaggccaggaagaagacgtttccgattagtgcggggataaagctgtataggaagttggaggaggagaatgcacttgtcgatgggagtgttggtagcttgggagggaagccgccttcgatggcgctgttgataaagctaacggcgacaaaagcgacgaagagggcgaagacaatgagagtccaaataaatactgggacgttgcgcagaaaccaaggtgtccagcgataacgggtggatggcgagtataggtggtgatcttgttcttgtgggtcattggcgaatgcaccgttgtgctcaagatcaaagcgaaccttggtaactccgtgtggttgatcttctcggcttttgcctgtctgatggagagatggggtgcgcactggggcatctacttcgccgattccgtagaagatctcggccttgctcgagagtttccagtatcccagtcgaagtactcgggggtcgagggattctcgcaccgaaggaactgtttcagagtgctcaaaatcgtggaggatattcgatcgctgtatgatcgagaccaaatctgcgaggctgacgggatcccacatcaagccagacgagccacgaaggaaacggatgaaaagcatgatcaggcctagtgtcaaaacaccatataatcccaccaatgtccagcccacggattgaaccgaagcccatcgccagacaccttgtccgtcaatgatatagtactttgcctggaagagacagctgagcagagggatggcgaagaaattcgaaagccaaattgtgaacaaagagaatccgaacaaggcttcaccatggcggaaatgggagaagtcggggaaaatgaagttctgcgagagaataggcaggcggttcatcaccagaccttgccctcgctctgctgacatcatagaaaatggtgcgatgcgatataccgcagcttgaatgacgaataaccatatgatgatgattgcggcagctatctgtggcaggaactgtagcacaaaatatctcgagtcgccttgacgcacgtagttccacaatccctcttcaccacgggaccaaacattgcaaaacactatacccgctatcatgagcagacagcaaaatatcgtgagcgccaaagcccacggccgcagaacaagaggcagatagtccaagggaggatacaacatgctcttctccggcgcatcaacagccatgaaggactcggggtccactgacattggcgtttgcggcaaagcctgtggtgagggagatgtataggacggtctcactggtggcgtgtcatgtcgaatgggggtccgcgtgcgggtgaaataaccgagtccctcgtcccatataagtctatcggttggatagtcacctgtcgtcgtggtggaaatagagtcattcctttggagcccccgagttctgtcttgggtgatctggtcgattgcaaaccggacgtatggggagtcatctgtgcctggagtcggagatggtcccgggtaatcactgggggatcggcgagaagtcccgtttgatcttgatccatcggatgtgggactgatgtgggccgctctgtcgtctacgaaccgaactgtgctggatgttggtgggcgttgggactcgcgatcttcttgggcaagctgtatttgcgacatggcgggtgatggtgcgtgggagtctggagtcctgaatcgcatggctgttgctagactctccggactagaggttcgttctgagaatgaatagtagtcgtctgatgcagccacggactgttgagattctgatcgggcaagttgcggtttgcttgctatataaggatcagttgacttgacttctggaagttgtgtaatgtctgtagttaaaaagacaacggggcaggggttcttatatgcacgtactgttaacgctgcgcaggctgaagtttctcgcctggttcatcatgctggctggatattgatcccacgcgcaacggtaattaatctagaagcattcctcgactcccttgagatacgaagggatttttcgagggccagcaatcgctgcccagcgggattttgtctgccatagtgctgggtgacgtctcccagccaccccagccacacacgctgagatttgcactcaacaaaccaataaggatgaattaaattgaagagttgaaactcaggcactattcatttgatgaatcatactagaaattccatcgaattaaaagttgaggaagagttacggaggtggttgagttgtttcgcggcccgatcaccagcacatccatcgcctaaagcttggccttttatctctccaggtctcaccaagtctcacacccgatcacctttcttttcaattttccaatttcaagaggtcaatttccacggtaaccatatcaaagccctatagttcttcttgaaggacgccccagaactacaatgtaaccatccggactctgcctcgcatctacaattgccacactggagccccaaggcaataattgccaacaattgctgctctagatagcagctatacgcaataaaaaagcagggtgtgttcaaaaatttgtcaatggttgcagcccactaacgcagcgtggtgttgcaattgttgttctcccttgcaggtataagtggctggaactagggcttcacggtccgccgagcacatgaaaacataaggctgtatctagggcagtatgaaacatgatcgagggcaattgtgtctattagacaatgtttaggatacgcatatctgtcttattcaaatgaagatttctgggttctcgttcggttatggataaacacgctcagaaaatcctgacatatgaatagttggtccaagggacttagaaatcgagaaacagagagatgaacatgactaatttttccgtttgttattaggtgctggatttgaaatcgtctgcctcttactctgtacaacaaatagttatatgtgcttccccggttctgtttgaagcttgccatataccaattaggtgtactccgtaggcacgttcaattccgattggtggcctcgtcattttatttggtacgttgtaaattcgcaccatgtcctgggactcttcaagagatgatactaccatcctctatttgattctattgatgctataagcaggccgaggttattgattccctacgctctgtgactccatttgatggcaatctaccattcttgatctcgaggccaattcttaacacattcaatgtgaaattattcttatttctcggccattatggcaaaggactctgttcatacatgtcatgtcagtaagaggtaaatctggcaaacttgagagtcgattagcacggaggaaagggaagcaggacttgcgcagattgccagcacctccaatcccgattctaacatagcgctcttgaaaaccagacgtcgaccgagtatcctgagccccattgagcctagaactctgcgctgactgtgactggagaagagctactccgtctaaggtttctaagggcagttgcccttcgtcgtcctcggatttctgccgttttggccaactgagaaacctccataggcagcgcatggttttcaaccggaggaatgagtaaacaaccttggtcgagggtttatcaaatcagtactctggctcttaatgtcttgatagattttacttacgattgcttcaaggcttcgaccaacttcaaatgatctttgcataaccctgtctcgtccgggaataatagctagttatacgcctagctagccggtccctttccgtgatgcaacgggttacgcagaacgaacactgtacgaccatgaacttcaaatttcccggaacagccagactggctaccgtttattgatataggatgatataagaggaaactatgacatatcagtatatgataatttagccaccaccaggagataagtcagtcatacatttgagatggagtaacgcattcactatgtgtgacaatatatgcctgcagtttttgcacgattcactaaagcctctaaagcctctagagaccaatttgaacaaaggctttgtcaaaatggagaaaatctggaggacttttattctatctacctcaaaaaagatcaccgttgatatacttctatttcattctaaagcagtatcttggggatcaaatgatctagtggtgtgtccaggttgcaatggtcacacgactgtgacgcgatagtgaaaccccattaggaactattggtccatgtggtcacaagcttaaggttaatgacctgaagatatcaactgcattcggagagagcctatgtagtaccttgcattagcaaaagaacggaagctgatcatgatcaaagatgatcaaccttatctggtctccaacaaatagaatgacgtttggatatccagttagggatttgaggtggacctgtttcatattttttaaaaaaggtgggactgtgggcctccgacggtgatactgagagtccggagttcaggcccaagcgtttccggggctaaatatcccggctgatagcaaaaactgctgtgccgcgttagtgggtcagacggtggcgagattgcgagcaatgtttgaagggtgtgcctatggatcgcaatatatggcgtatcgtatggacacattttagaaacacagatcttgtttcatatgaataagatgaggcttctgaaaccatgtacatattggctctttgaagaccctaattcgaaaggagaaatgagcttcagtcacttggtaagaaaagcaggacccaatcgaacacggcagagaaaaagtcgtgtttcctaaggatttaagaagttggcaaaatagccagcgggaatagccaatgatcttgcaccagccccgattgctccgacggccttggcaaccccgaagtggcacttcaaccgcgaagggcgaatgagaaggcagaacagctctgcgccaacgtccccggcattccagaggggaaccgtgcagcggggcaaattatttagcctcgcgtttagatgttcaaaggattggaggaggaggtcaagagagaatagaaagcttgatatgaggaatgacagagtaatgtacagagtagataggagggagtacgtatgttgtagaaataaagtggcatcatctgactgctgcctgaggccagaaatccaaacctcctcctctctccgcagattctctggtttatctgcgctcctcgtcattcctttattctttttgagtccgtcgattcttttgcttctttgaatttccgtcgactcttaaattcttggctttcccctcatttgcttcttctttaccccttctttgctcagaaagcttttatttcgatcccgggttcagatgtccccagccaatgtggtgttagaacctcagctcttgcgtcgcgtgtgccattaggccatttaaaaaataatcacttgttttgtccctatcggatttctcctctggcctggaaaagagaaggtcggcttcttagggtctcccctcatcatgttgctcaaacccgcgacacccctcaccatcttgctgctgatcgcctttgcgcttttgctactctcatgtatctcaactcctattgtgaagggaattcctctagcaactttcaaagatgtcgattatggtgtctttggatattgcaagggtagtacctgtaccaatatccatgtgggatacacgagcagtaagtctcccccctgcgtgtctgcctattctccgctaagtttcatgcagatgatataagtagcacaggcgatgatttcaatctcccttccggtactcgaaagtcactgtcctcgattctcattatccatccagtcgccgccttcctgacccttatttgcctctgcctggccattgcggcccacttccatgcgccctcccactcgccgcgcttcctattggcgcttctcatcttgttgctgccaacactgctcgtgtctctcctcgcattcctcgtcgatatcttgctctttgtaccacatctaggatggggtggttggattgtgctggtcgcgaccatcatcctcacctcctgtggagtggtcacctgtgccatgcgccgaacccttgtgagtcggaaggcaaggaagcgtcggatcgcggaaaattctgagatgagtggagagaactattataaccgacagaatgccgctgcggctgcgccccctgttccggctcccattgaccccaaggaagcctttgtgtcgcactctctcaactccgactcgggcccaacattcgcatccttccacgtggaaacgcgcgacagtgatgacgatcgaacacccctcaactcgcggactcccatgagcgataccccagcacaaccggaccatcacggtgctccctatcgcggcccgcaagatgaatttggcaatatcccgcctcagggcccgggcccgtacggtgcaggtctaatgtcacggaatccctccgatccccgggttcgcccccaatattccgatggcagtatgggttctcgaagaggaggcgcgccgcctggcttcaatggacgcgggcggggtggatatcctccccggggtggacgcggtggacgcggtggacgtggaggaccttacatgggacctcctcgcggccctcctggctcccggggtggctacatggggccaaatccaggccgtggaggtcgcggtggaattatgccaccccggggaccaccagtcggctatgagtccggtccaggcggccccaaccgcggtttcgacgcatacggtcgacctgggtcgcctcccatggatgacccttatagttatgggccaccgggtcagatgcaccagccacctcccgggcccattggcatggccgtgtcaccggagacggtaggccaagccattgagatgactccgcaatctcgcccgcagtacgagatgcatgagtcgactcaaccaatgagcagcgtaccgcaaacactgtcagccgaaaaccacggtgccgtccctgaaagcccgacaagcatatacagtcgaccgaagtaagtcggaatgctacgaataccgttcctaagttgaccactaacctttgttcagttcctatgatcctcctcgctcgggctggggtgcaaatgatcctcgcactgtgaccccgcagccaccgcaacaaaacaacatcagtaccaattactacgaggacgtggatccccgttttgctcgtcggccatcgcctcctactaactctgggatccccccctctctgacgcctggagctactcactgtacgtacactcacagatcacacgtgttgaaggattcttgctaactttctcctagtttgatgaaatctattggtttctaagtgttattcatgtttgacacgattctttccacatcttctatgctttgcgataccctttgcttttcttcttttctctggctaaattttgattacttttttccctccgatttcatgacacactaagtcattttggggaatggagttatggtgtccttttatcttcccattcctctataaatgctctcttttgggacgacaagacgtttcatcttgtccccaaaaatccgccacaagacacggcgttgagaatggtaattcttttcgctgctcgattgtactctgcctggacttccatgtatagcagcaggcggatacgatgtacagaaacaaattcctaagatgtctggctttatccaagatcaacagcatatgacgctgctactgatttgatcttttttgtactttcttccactgagtggactgtgacttttatcttacccgaatccatgtacatttctgttctctggtacatttgacttttcacaatttccaaacataataattagctcttctgtgatctccgcatatgattgaaatcttctctccccaaaagaaagatagccctgtaatataacatagatcgagatcttcaatcctccttgccaatcatgaatgggagtactaattcagtctgaatcgacatgagaacaagcccaatgtctctggtggcgaagatgacgacgaggtatagatgattcgtgagtggagctggcttgatgagatgagcatgttgcttcgagagaagcgtgaagttgaatgtgtacttagggtatttctagagggtctagattgtgagttgaggaaggctcaacgggattattgtctgtccgagaaggagcaggggtctaggaaaatgatagcaaggaagggacgatgaatgatatccttgttctttccaagtcatagctcaggtctggggttattcctcttttgttttgtagagttgacaggaaacagggggaacggactgcttcatcgcgatagactaggtaatcgcaaacatatcacgctcatattacatttttcatggttttagaggctctaactggcaaaatactatgtaataattctcactttgctcttactttttgatgaatctatcgaatataactttcatatcaattgtggcttactctgatacggtcttacattgtcactatatttgaagtcatagaagtgtacaaacaatataagcttatgggtattgataccaggaaaacaatggttaggctgtactaacattattctattcattttatagagtccctgaattactatttaatatactacccagcacgttgaactttcaactccttcaacaaccacgatcacattggatacctactacaacccaagaacacaacttacaaggtatgaccccttaacccatggccaagatttggtatgaaacaatgagctatttaggtctctgattacattgcaggttgagcatcatcaaccattctccaaatcacagacatagcctatccaatatcccccaaccagtgagatagacgctgtttctcatccttcaaaaacagaggctaacaagcttaaagtgaccgatattcggcccattccgtcgcccaacaatgcatagctagaacatctagcaaggctcacaagccgtgcaaatcttcgcgctcgtgagtgccgaaagatagaccaggagatatcgcggattacgagcagcaaggaagctacaatgaccgcaaatccatacttccactatactcatggaaatgtcctagcggacatggacagagaattggcgtctctctgcagcgaacttagggatatgaagaaagaagaaaaaaaagaggccatgatggaacaggaagtctggaaccagattggttgaatgagaaccaaggcgttaagagtttggctcctataatggacaatgcccttcccggctctatcctcgatattatcacgtttaccaacagtactacgcattcgtttattcattttaatattccattagtagagctgtaaggtcaatcttctatgctggaccgaagcgcatatatcgtttctagtcagtacaatgacagtacactcaatagcgctactatttccctttggggtggcattctcacagatatgggcatttctggtatagatttacctatcatgagaagtttcagctccagtcaaattatcgtatgcctatagctcgcgtttgatactgagaactgaaaagctctaacaaatgctagagctatgtgacggctggtaactacatcacacggcagtctagattgaagtaccgaaatccactatctaggcttagaccatgaacttatattgagatggtgcaatatcagtgtctgatatgtagaatacaggaaaaatccggtaccatgtcatttctgcgccacatcaacaagtccaccagaacaacttgatgagaaaaatcaccacaaggtacctgtgtactcccattcgacaaccgctcaggaaccttggaaatttattttggttactagtctccattaggaaataaagagtataaggataagagatttgttgatgtttagattactgagtatgggaataatgagattggttgtttcataatgtatgcattgcttgactatccacaatatatcggaggtttatctgttcattgcctatcaaaatgacgatctccttggccactatgagcacctttttaacttcctccaggatgttctttgaaacaacaaggaccgccagtacatgcctccatctctgttgaagtcaatgcatcggggtggcggaaagtggcaatatcatgggtgtagataagtagtaaatcgatcgtccaacgaatgctggcttcattaagtagacttttggagcgggcggcatcgactttcgttaggacatctcacaggatggagctcccagcgaaagtgcgtttgataccacgaagtcgacactgctctgaaccagtcagactatttccagactggagtttaccagcaacatctggtgagatggtatgagatatcgacaatgtatgcaaatttttcagggtcgctgcgaggatactcggggaggcacaatatacgaagaacatatcgtacagtttcaagcactgagctaccataggtagtaacttggaaccctgttcataatcagaaatcagcttagctcggggacatcgataataactggtgggtcggctgtatcaaccagccagtgcgactgagagcattctcaatttctgctcatttgttgaatttgacctattcgaaacagatccattgtgtaacggcccgatcaccttgatggaatgacaggcagagaatctgctggagaacctacattcattcttccaatccccactgcaagacactgatactgaaaggcgaggcctattggaaccccgacttgtgcgtgcgattcgaggtgtctcttcgagcatagacttgtacttgctctagctcctccagatggactggatgttcctcacttctttttcctcagcattttgtttcaatgcagttataaatgcagcacagttgtaacttactgaccaatctatagtaaatattcggactcttagtggttttatataatgaaggaaaacgggaaatgaccaaagagtaagagagcagggaagaaggattgatttctaaaagaaaaaaaaagaaacggctaactaaatagccagtggaagcctcacaaaccaggtatcaaggcatcctcaaaaaggaaaatccctagttaggtactccgtacagttcggattttcacacccaccaccacaggcttagtaaatcagttgtctctagttataactgcttcgcttcgctcctcaatgatagatatagtttgaaactgccatagcaaagccaaagttgcgagtacattctcggtcgaagcatatccagaacccagattgtcaaccccctcttcttccttctttcttcaacctctcgcacttccaataatacgcctcccaccaaaggtcagatccctcagccccatggctaagactttcggcgaaacaataaactaacagagactaatcttttgataggctaactaccttactacctccccagccagagaggtacaccccgcgatgcaccgttcttaagcgcggttaaaacataaagctaagaaggagacagtcactgatgagaggccaatcctatcaccgagcgacgagcagctataccagcttgaaatagctaaggcttcgggataacgagctcatcttcaaggaatgttgctacgggaggcgatataccaaacgggctttctcgagaatttccacatacaaccgaattgtacgacgagacccaagctgaagtgaccaccaaccatgccgtgctcaataagggagtgcgtgtgccaggcaagaaatggtacgatctgaaagatctcgggaaggaccgacggaccgtccttgcctgtattccgtccactgcgattggttccagtcctgcttcaaacccacaatccgattcccgaactgaactcgacccgaccaatcacaatggtcggccgcgacgaagcccgatagtctttcccgagagatgctccaaatcagcctcgctgatctcgaaggggaaatagtactgatgatcttactagatatactcttgggaatgtttgctatcgggactctgactctctacctacatcatggggagatacaaatttcactttacttttaccttttattaagatcatgttttaacgagcccatcaagaatcatttcgctatcaattatttacactgtatatattcaatcaatatacctagcttccaagagatcaaaatgatgagaacggggttgtggctacaagcattgactaggctttcgttcctggggcagtattcgcgcccactccttcgcgtgtttgttggaagatcccacacaagattcttctcttcttctctcaacaaccttggactgctctacatatactactgtcaccacattgcaacgactcaaggtatgaatagttggtacataaggaccatttgtggtgaaagaataatctaacattagtaatgttatggatcaaactttatcatacctttcaaggccgcaacagtcctctatcccaccctgctaaaagtgagatccacgccctcatctcgatgttgtattcctaactgtcttcagagagctgacaaagaaaagtggccgatagtcggccgattccgggcccgaacaacgggcagctggagatgctaacccagctgcgccttattcggaccacgctagctcactctcaaagaacgaaaatgcggcaggcaaggatggtaattcgccgagtacaacttctgacaagccaatgtgccgctaacggccaggcctctactcctcacgcattgtggaggctcgagcgaaggatacagtctctatttcgcaatatcctcaggttacaggctgaacaagaggctgcccgtgagtttgaagtggagatctggaggaacgtgcgataagtcaccaagtcaacgatctacagccctatagagccttgtgtggatcacaatatcaacattgaatatcggagcaatgcctctttatctttcattggttgtttacctttgaaacggatgtagaatacgagagaattcttgcattaaaaccggagagtaagctgaacgcgccttaatatgggctatctacatactccgtctttacaaagtaagtgctattgttaggtatctcagggcatttttaatgatataattgcagttcgaaaagtccgatgactctgactttgtgctccggatgaaagactgatcatgtatacattgattacgagtaccaaccaaaaccaatggatatactcctccaatatcagagcacgatttcacgaaacgattctacgcttgtcacaaatcacggcaaccctttcacctgcatcatcgatgtaaaatgccggaaacatattcttctgacactttaaagttcctcccaaagaaaaaaacccagattgaggaagtaggtgacaagcgagaaaattcctgggagatctatacgcgcgaaatcatcagcctacggtggatcatcttttacaaatttgattatattttacctctgttcgcattcttcttggcatagattgtaccctgagggcttgacatagacttacagaacccatctatcccgctctctataatgatttcgatgctttcactgtttggggcgtttttcttggcagcctgcagtttagaaggccgcattaaatctgtgattgatagggaaagatcagctgtctattggaatttaaaagataatgtgcgatatgctttcaaaggaaatgggtctgagcgaatctgtaatatttatatgcggtctactgtacgcgattgctatgctgtctctatccggagggcgcttcctcagctcaatatcagacgaattgtcgaatgtttacggatagatcattggtatggtagaaatatataattgcatatacattggtatacttggcatatctatgaactattattggacgagagcgctgtaataagaatataggatgaaattgcattaattatatagtggcctgtttgtcttatttgccttagattcggcccgaacgggggcctgaaagcccgcgcgggccgagaagtcaggcccgaagctcgacccatcgacgggccgggccgggtcggtcaaaacgggctttggagaagtctacctcaattcttctgagaccagtcctcaacaaaacgcctgtggcttgggttggcccctctgtcttgcattcaatgcaacgtgggacagggataatgccatagcagcatcttccctagacccaattttattgacccttatcgcgccaattatatttctctaagctgggtttgcctgacaaagctcttcttcctccattcgtaaaaagcaactggcttttaccctggctttcaacacaaggaaagaatataaatactataacccgagtcttccaatattcactcatcatgacaataatctatctccggttctcgaagaaccctgctcctgttgaagatattgccctcgtcaccaagactcttctaaacatcaacccaggcctagacgagaccgagcgcaccgaggataccatcaccttctcttctccagaccacgacgtcgacatctttggtgaaatcttcgaagaatggctgcattcagaacccccagtcatcacaacgtttcgaatgctggccgattcttaacggctgccgtcagcctcctgacattattcggatccgtgtcagcgtcggccctacctccccttctcgagcttacgacggactccgtggatctacagtctacatatactttcaactgttactctcctggcaaggcatgcagggggaatggggacactactggtggtgggtcttctacggagggctgcacgcccatcagtgcgaatggctgtagctagtattccttcaacggaggtgggcagttcaaactctgtgtctatgaaaacagaggatgtaccggtaacaccgttacaagtgtcaatggtggctcagtgacttgtcttggaattgaaaatgcgggtgcttataaggtgatcagaagagataccaactgctagaaaattcaggacatcaggctagccgagttccacggcaaggtgccttgcaaaaaacccatactacccgggatgagctccgtaaagcaaggatccaatgcggttacttctcgtggaatgaggagctttataggcagttttcgggtcttctacctctttgagctccaggctgtgcgttccatggctgtcagtttgatggtaaagcaatatcgtacccgacggaccacagctgtcttcgagggggttccaatgaatgatgcatggtcgtgtttggggatcatctgcagcctgagtgattgtgaaggggattttgtaaattgggtcgtccacccccacgtcagcagttgaatctccttcaattttgagcgtgaggtggagtgtgtctagtctgttctaattagtctcttttttttagtttcaagggggatcttcttacgttctgtctttcttggaatatttcacgaagggtagcaactgctgatcattgagttcttccatgtggataatttgccagacttgcgattctccgtgtcggagagttgaaagttggacacatcacatgatcatggtagggatctcggcatcagctaccatagccctgttgatgtttagattactgagtgtgggaataaaatgatcttagttgtgtattgctcaagactgtctatctgtctgttcgttccgcatgtggatcctcggccagatgcccagttccactcagtcataccccagattacttggtcatttcaacaagctccgctactatccatagagaatatatcatctatcttactgcgccttcatgaggaaggtatagatgtcactttcgaagggaaagagcgaaaccagactgatggcctcggcatttctatggtgatcttggtaatgataaatgaagccaagtaagctgcttctagtaatataatggtataacagaagggtagatctctcaatagaaaggaaaaggaaattgagcatgagaataagcagttgaaggctatataataggtcaatagaatccgtttgcctcaatgctgcctttagagacctctaactacggtgagcatatccgttcttcctaggcctttcaaacagcacatcttcattaccttaaaaccaccttgtctgatggataatagaattatatacaactcatcattctttcattcataaataagttgcgcagtaaggtgaatagcagtcatagaactcttagcgctgtacaaacgagttcttctatagatcatttgattcatactgacatccatagacctgatcaagtgaagaataaggtgtttacctataccgcccccaatgaaacaccatactctctcacttctgatcaaacacacaacacttgccacactcaccatcacacaatcaattgaactttctaccatctcaacgcgattcttgtatgcagagatctcacatgagcttcttcctttctacaaagctcacacactcccaggataccactcaacagataccatccaacatcccacccactcctctacaatgaaatacaaaagacgaggaaagggtaaaccaaatgggcagcagccccaagacacgggccaccactgcaccgtgtgcaaaagccggcaattcaagacagagcaaggcctgagtgaccattttaaatgtcaacacgccatcttcccatgctctgactgcaacgagatctatgcggctgcagtcgaactagccgagcataggtactcagcacacaacaagggaaccttcaacaaacgatacagggtatcacccaacaaccacttgccaacagccaaaggcaacgcaacaagccgacctagggctgcttcctcgcctgccataccaggcttcctctctacaacaaaggtgcctgtgcatctccgtctcctaccttcccgcactcgctcagcttcacgcacgtaatcgcgtacctttcgcacacagttgtggtccagcaatgcatgtccctcaactacctaatcaagtcccccgggagactgagtaggggcatacagcatgcacgcgcgtcttccgaccatacgctagggtcttcggaccacgcgatgaatccggtcaagacccctatctatcaatgcagggccatcaagtccccgtgggtatgggcttctatccaccgcccatcgaaggccttcaccacctggtgcaaatgtaccaggttcccagttaggtaggatggcgattacgattgggatgtcaagcacccccacacatctaccatacaatgcacggggttggggcttgctaagccgggcgtggatcttcaagatgcacgtgccgcgctttgccagtatataatccaggtcgcagtgcaaatcgaccacgctccgtaccacaacctgtgaaccctggccctggcgctggggctgggactagttcatgggtgtggtgctggatacgttcgtggaagccgctgaggcatgttttcctaatttccccgcgcggatgatgttgcctctgcccgcgcgggtaggcgctgaagattcttacgcgcgagctgctggggatgcggctgcggctgcggttgtgaggaaaatcatgtgctaggcggtgcgcacgcatagctgaggctttgatatggtgtttgtgttcgctggagtgtctgatgacataggcggagtaggctgagtggggtgcggcatggtggagggtgttggcgctgaagatattcgcgcgcggactactgagtatggaaatgttgtgctaggcgatggatgcacttccattgctgaggctttgatatggtgtttgttcgccggagtgtctgatgatctggctcgatgtgactttgagtgtatggcagcatggtggtgcttgcactgttgctgtccatgcctggtcctaaggcactccggcgaatttacaacgagggtgtggttctcgggtcgctgtgagcgaaattatttatccccgtactgatcgttgtctctggtcgattcgtccggctggggtggtggatcatcacgcggattggcagtggggatcacagtgatgttttgaattgtttgaatgaagaaagtcaatttcattgtctcctcgtaggtgaaaagcatgaaaagaataaccacctcctgtattactatgtagaaaaacaaatgcgtaattaagtatggtcactattgaaaacagtactaaatcacaacggaaacaaaagaaagaaacattgcaatattggtgatgggggaattaaacgccaactttacagaaacaggtaagaaaaagacagacaaagcacaagtagacaatcagacagtcaagccaataggagtatgactgcttgaaaaaataaagaagcaaaacacttgatatagatatgagaacacctccattctctatgcatgcatcaaagagcctagaaaccaaaatccagcgctaaacacctcaatccagatggatacataacaagggcattaacgtgttcaaagaatactccgactggcctggctacggcctgcctggctgcgactagccaaactagcacggctgggagtcgtgcgactatgctcgtcttcctcgagaacatcactcagacgcgtgggatgacgatggcgtggtgtcacagattcccacccggtgccggggccccatccagcgccgctgtagtccgcggcggaggccggcgccggcggagggacggacgagggggcagaggtatatgcgctttcgggaatatagtgttcgtctagcagagaatgctcatactcttcgctttcctccgaaggagggccaggtgggtagcttaaggagtcaccatgggggtcgtgggggtagggggcatattcttcatcgcccgcttcgctgctgccgacgtaggagcgcgcgtcaggttctgaggttgcggggtaaggaaccgttgtattgtcgtgtgcgtacagtggacgcggataggggacttttgaggtaggtgggtcaacctttttgggttcgatgaaagggtcggatcctacgggagacatcggcgtgccgtcttcgtagtattgtccggcgctccctgcaggcttgccgtatgcgtcggtgcccacggttgtggctgtctgtccggggtatggaccctcgcgggtttgtgggcgagtcgtgttgtgccgactaggaaggccagaaaccataggcacaacctggacgcctccaacaagtgtgggctctccattgcgcagggagtttgttcggtctcgctcttcttgttcacggcggccaagctcctcccaggcacggcgtgcctcctccttggagatttggagttcgcggcgcatctccttcagcagttcctcggccttgactttgtctttttcagattgctgggcggtagaaaacgcatcggctcggccttgtcgctcttccttgagctggcgttccaggtccgcctgcacttccttcgagcgttcctgctcggcacgggtgtcaaaaaaccagcgctggaacttgcgttcggaggaggcgcgaagacgttgcagttcaaccaccgcgtggaatagattggcaccggcggcagacaagtctgtaatctgtcgagccaattgttggctaatcggatcacgctctagatcctcattgttctgttcgagtttgcgcatccaataactggtgagaccctcccagtgtgaagacagcgtttcccatcgctcgaatgcatgcggaaacccaactcgtttcggctgctgaagagcctggggagcaccttgtcctgcgggtagggcctgggcggatttggagaacccactgggcttgggctgacctccaatttctgccgcactctgcgagcgaccgtgttgaggctgctgagcggttgtttgtggcggccgtgcctggtttgcttgccccgtgccaaccgtcggcggtgcggtctggtattctgatggcctggtactcggtgtattatctggtgctggccggtaaccaggcacagcccctgaagcgacgggtacggtctggggctgtccctcggggccccttgctggtcgtggggctctgattcttgattgggaggcgttttcggcggcaacgccagcagcgtactgttgtgcctgggcctgggcatatttctgggcttctgcctcagcttcagcctgtttttcctccagttgttgccgttccaattcttcctgttctctctctcgagcctcgctttctgctttgcggcgagcctcccgatcccggcgctgtctcatgatatctgtaggtgtcctcatcccactcggtggctgtgatgtccctgagatgggattctggggtacacgggatccgccattctgcccacggctattgttcacaggcccagcgggcccagcgacgcctaccatatctgacatagaagcattcacttcgtcccagtcggtggatagctgcagcggtccacggatagcttcctcgagggcgaaaaggattgcggatgcggtgcgcgacgagaccccggtgtttctctgcggccagtatgaggtatggagaagctggtacggatcgtcgattgtagacccgttgtcgtcggtctccgcttcggaaagggccggacgtaggtctgcgatgccactggctgcagcgcgttgtacagagactggggttgtacgcgccggctggtgtcggtgtggaactggggcgcgtaacgagacagctcgacggtggggcgattggcggacctctgcctgacgggggatacgccgtaagggacgctgagaggcagcgctggagggtctcagttgatgaccggatgaattagaagggcgttgaacagtgggctggcgttgccgcgcaaaggtcgtgaacgttgatgggtcgtaagagtcgtggacttcgtcaggggcttgtggagtgtgtcgagacacctctaagaatggtggataaaattgtggattgggcgacaatgtgagtgtggcgtcactgcttgaagcagaatagcttcaaagatcgcgatcgcaaaattatcgatcgctcacaattcgaggatttacagctccgacggctgtacagaccaatactcgatgcacaaggtaaagcaattgagagaaaagcgaaagcaattcgaaatccgaaaggtgaaaagacgaggaagggtcggacgaggtggctggttaattgagatggctggggctgccgcagctcgagctgcagcgcaccaaacgtgtctcggggatgagcgccaactcttcaagtccgactggccggattcaatgcaaactgatatacggagtaaagacaagaagatattagactggaggaagctgaagggtattccacgttctcccaaggcaggaatgccagcccagtgcctgccctaattgacccaagtctggactttccttccttttttgctttttgcttttttgcttgttcaggctattacgaagtagatccctagggccttcataggctgtatgtcaaatctcaatattgcaccgtcatgcgtccagatcccaatgtcgctacgcaaccaacccgggaagcagtacctcaataattagctgcacctgtactgaaccggtcacacggaccgctgtaggtaaatggaatgtccagaacatgcagtgtctgtgttgtgtatgttgtaggaagtccgaaagataggagaaccctggaaatccttcgggctacaacctgaaatggattcgaggcaattttagtttggctatcgtgccatggttggcattcagggctaacaatgatacaagaatagaactgaatattgtattatgtagtgatgtgttggcagaggtgctgtacgttcagtcgggcaacaatatatatcctggtctggctaagatatatagtcaccatgtcatcatcaattcaggcctaccgggctgtttactatttattacgggcattcatactcctacggagtcctaccgtctgttatatccacaataacgtcgtagttaggctccatccgatccactggctcgttctttgctacttctggaacgaactccattctccacagctggtaaccgtggaaagcgtgaccgtgagaagtaatgatattccaaacatctaggtacatctctacatctctacagcatattgctaattattctacttccaagattctccagtccatatactttacaagttacaacgcactgcccggcatttccccgcaatgacatcttctcgagccctggagtgacgatgacaaagcagcgatcctcgggccaaccctagaaacttggaaccttggaaggttgaaagctaaagatccagtccacagccagaataagccaaatggccggggccccaacacgccaaggtccccccatagtccaagccgggcgtcgcggaagcccccgaagagacccgtcacactacgcgggacgttaaaggggctctaaagtgcggtgcgaggtagcaactatcagaataggagagaggatcagcgtggaagaaatatacggtgactagttaaccacgtctatatatacccaccgaccccatctgggtgctaaactacacacaacagtgcaaatggctagaaactgctccgggggacaatttttgtatggcgatggtctgtgcacgacaaatttagcatacaaagtggaccagtttttcgaatccctaagtgactgtttgggaaccgtgaaaaagatcaacaggtctcgtagtgcggaaaatatatccggtggaatctatcctacgggagtacggaataggttcacatatggtggccttgtagaccatcgattttcaagcaacctgcaactccattggcattattgcacacatttagtgtataaggagtggatataaattctatcggaaaagcccttctcggccgcccgaacctcctccggtgcaaatcacagtggtatctggtttgggacattccatttcttcctacaatattgggggtagttacccgggcgataaaaacatatgcaatagtgaacacaacccctagctatccccaatccaaaacctcaagccaggagaacccaatacaagaccacaccgagaccccaacgagagacacacccgcgccctagaagcactacgaccttagaagtaatattaacccccctgtcccaaggcctgggcctcaggagcgaacgaacagtaagggccacccaaggaaccgggggatttgacacctcagtcgggtcggggaaagccttcccgcagcgtcgcggatgcacgaaacacgaaacccggacggtcgccaggagggagccgaaacccagtattgaggtaggtttcaagcatgccttgcagcctgcagccggggttcgcgggagcttgggtgtttgggctcgggtgtttcagtttctttgtccactgtcttgggatggggctattggccaataatggaagtatgttttgcaagatgctgccgcgggggtgatcattgagatcctctgggaagggatctgttctaggtctgtggattggggagatcgaattgtgcgatcgtgaacgattattttggattgtggttgaggctcttcaaggagtttgttctatcgagggagttgggatggatgttctggattgttgttccattgcccctatgtaggaaccagtgctcgatagatgaatgggctgtgttgcactcgagaacaaatctattcaaaactctatgtgtctgcactcaacatccaacggggaaagaatgtgaccgggaggaccggaggcgagggtttcagcaacgctgagtccgcggtgagctaatcgctcagagatcgcgcacagtgcatgaactgggcgatggagagctattgggcctgcagatcaggggtagtactgggggatgcgctgatacttatacatcggcgggatggctgcacttcggctgtagtacagcgggatgcatgcaagtcagacttttcgatggaatgtggggtttattggcttagctgaggatatgtctctactaggtagtttgttttattttgggctgctttagggcttgcagatttgccacgatgcagaatatagcgatttcggttgtacacaatatgggactgaagacatatgagatggagcgagatctggagttggatacggcgaacacctcggtataattgctggatcgaagtgaatttgtatgccaggtcagaagatgataaaaaagagttcctcgatgaaccaatggcagcacaatgtcagagttacagacgcacaacatttgtgatttgtcaactgtcagggtataactcagcgccttgggtgtccgaccacttctaggaaagttaggatggctcatccgactaaattcaatcgaggcatctaagaattaaggcaaaactagggagatactaggagaaataggaaaccaggaacacaagggagccaagtagtatagctcctttcactcctgcaaagtgcatccttgatattactaagatagaaacagcattaactaaagataactatctagccggccgccagaggaaaaacagaaataaataagcccatgacgtacgtgataggaggacgatttccgatatggaacgttgcgatatcgaattgtgaggctcgaattttaacgttaggaagattaggaatgcccacacagtgttaagccctaacagtgccaaagtactcctaaaccacagctaaagtgctgctcatccaaagtacaaagtgacagagaaacataaaccatatagatcacggcgatcggcgttagtggctgatcccgggaactccgcaccaaattggaggtgatatctcacattttcggtcccagccctctttctgcacagtatttttggagactgcagagagcattatttctttcgactttcgcttctgacaggctgaggacgatttcaaatattaaaaatgagatctggtggtacgaatacctcgtgtcacttccttggcttccataatccgtatcacagatcacagacacgcaggcaacaacgaacacagcacagcgacacagacacgtacaatccacattgtattcttcgggatgtttctcggtgcaggcgtacggatcaagttccgcgcgcccttgctgggggacccaatcgaagggtccttgctgcaaccccatccctacggaaggggaccatgcaaggtcagataggtcatgatcgtctgtgcttctgttgtttacattgtgcattggcatgcatctgcgtttcgagctagccaccgggtcattgttctaaggctctaggtcctcggggttatttttggtataaacatatccccttcaccctggcctccacttcggtcatttcattcctcattccatctctttctctcgtcctgtggcaattctgctctctagacctgtcgtactgtgcctagatcctagagatcttgctcactcgtgttacttctccttcatattactcgagctcacagtcccatggatcacagaggtctttattgtccaggcgagttggacgtgttgtatcaagatcggaacagatcagagactacaatttgtgtcccgtcgccctcacctgcaaagcgaggatcatcttactaccccacagccggcccaaaggtcttggaagagtcgaatcttgatcctttctacctcgaagaatcattggccgctacgccgtcttggaatcattatacatcggacatgcgcaatgatagttttgacgaaagccaatactatcccctttccttgaaccacaacaaggatatccggaacccattacaataccccggaccagatcgctccacacttgcacaggtggagttagagaacagcttgcgattccatcgatacactccatcgacagaggagcacagtccgctgcacagtagccagctgtcattcagctccgtgcaaacagatagcaccactcccgacttgacaccgagcagctccttctcttcttcctacgattcacctaactgccccgacgccgtcttggaggcgacccagcagctatacaagcacgcgaaccaggttcagatcgagcctcgtcgccgccgcttctatctgcctgcatctacaccaccaacatactctcttcccccgccacctcccccgccggtggctcctatcaaccaagatactttccagcactcaaacgattcaactactaccatcaccatggtctacgaagacgtaacaggatcctgctcatcgcggtcccgccgcaggaagcagcctcccgccgttctcgatctgtcgcgtacaaccagttccccaaccagatctcgccggaagcaatccagccctggaactcgccctcctctggatacttctatgatctcccctccatgcttgatcaacccaattaccatggagcctcacatgacccactttgatcaccctctcttcattcctgccaacgacggccctagccccgttcctagtcctgtggctagctccccaccaatctcccgccagtggaccgcaacctcgatggagcggccctcaatctccactatcgacatgttctgtgagcagtccgtatgggagtctgactccgattccgagtctgctggtcgtaaatccatgtcccgtcggccaatagacaccctgcgcaaggttcgcagtcgtgccaagctccgtgccgctaagtcgcagccgagacttaaccagactatgcctgatggcaatgtctttgagcagtttccatgtatgccagaggatatcttgggagagcctatccctgaagctttccgtcctagcatggaccgccccagcactagcaaagaagctgtgcggacacccatcgggctgcagacattgcgcctcgttgacccttcctccacctctctcactcgccctccccgctcccgcaagaacagcagtctcaacagctccgacgttgaccgctccgcagctgccgctttccaagcccagtttcgccgtcgccagcgttccgagtccactgaatacaccaactctgacaagagtgacaaggagaaattgacctcgttttgctacgatcacttctcctcagcccccatcaacggatctcgcgaacagcgccccctcttccaacgtttcatgaactccctgcgttcgttgaactgccagaagccccaaaagtctaagaagaccaatgttaccaccatctgatgcatttacactcggcgttccggttctctgggttcaattttaacggaccaaactatgatacaacataccgacttgaccaacgatccctccaacgatttcataacattgtcttcatgcttccaatgtgtctcgattatcacgaacacgtccattctctcacgctatatctgattctgcttcccgcgcacaatgaaaataatgaatctccagacccgactgtggatggacatagacgcgctcaaccacgttctttacatgcgctatctcgcgccacgaaacgaacatcacgcctggtcctacggaccatgactaccgacttatgactcgataccctcgagctaactatctttaattttcctacctgtcatttgcactctttttctttcctgtcttgactgcgcctcatgcgtgctgtattatcatcgctctgtctaattacgaagttactatttcgaacggtcttcatttttaccatgtctgactgaattatgtctcgccattgctgctacgacaaccaatttttttattcaccttgtgatctataattacaaactagcggaacacgccttttaggtctgtgtttctatgaccaaaaattgcattctctgcactcttgcattcatcaaaagtcgttccactacctcatactctatgaatagacaaaaatagagaccatcacattttacctcaatcatgaatgatcctttgttacttcgttgcctaggggacgaggccgttttctggaatgccagattgcgaatctcagacgatccccaaaggtatctcgaatactacagagtaccgcaacctaacctccttggacaacatccatccgaccgagtaatgacgaccaacaagatctcatctgcctagatagacacgcctcatagcccacgccatgcacggggacccaatcacacccgcaaaccccggaccaccaagggcgaagggagccactaaaccttgccctagaccaggacgaaagctggcagattttgacttgtgcctccgaacgactggctcattgcacggacttggatagcccgacgcgccacgtatgtactgcgttgcgtcatggtcattcctaatctagaacaatccgcagattctctttcggctgtttcagaacactaatatactatatagcgtatccagaattccgggtctggtctgccagcgtggggacactaatgctatcctgcttacctgtcgaattctcgatgcagctattcgtatgtttccccacagcggctgcaccggggaaccgcggcggggatctactggctgcggaggtgggatgctcttggatcgacatgtcgaggcgcgttcggatttgggtacttagggcttggatgccaactgacgactaccgaccgacactcgcgcctcatgtacatgcacaaggcccaactcacatcgaattcctctcattcaaacacaaaaccttctaactagtgcattcacaaaataagtgtctcctacgcacaaaacccaaagaggataagacacatacatcccttgcatgcgcccctcaacggccgccaagcatccgagacctcgaatctcacctcggctgaaaagactcaacggatacttccacctacggactactttgctccctttactttgtgatagaagcttaaatcaagcctaacaatctgacccgccagacaaagctaagcaacccgtcctccttcccgtctccccctcaaccctcgatctgatatcacaagtgcattctctcctctccaatactgctccgtactccaacacgaccgatcttcaaatccccactttgacaggtagcgctagacagggattattcgagccgggccaaatatagatatctccatcccctgggccggggctcttccgtggccacctcacacgcaaggtcgccgatccaccggctgtgggccctttgcatccccgagacccgccagcttgggcgggtttcagatctatcggactttgggctgtggggctagagggctcgatttggtatcgcgtctagaccttcgtgctgttttgttttgttggaggtgcttttgttttgtgcgattacacgctataagatgtgacatgtgactcgtcatttctgcctcgtgtttgacaggcgcgatttgcaggttgctttttttgctctgacgaattgtggtctattgtagactacatcgataattgcgctggtggctatcgttaaaaattcggcgaaatgtcgctgaattcgcagaataaagtcggatatctaatccgacacgaacaccaccatggcaacagccgtgcatacagtagtgggcagagccccagcgtcagtgtgtcttagagaagcacgatcattatcccaagcaaccgagaacagtaggtcggaccggccttccgcctagcccgtccgccgcatcaaccttgcagtggcagcggagactgttccaaggctctggatactcgcatcaccgccgcaggggtgatcctgcggcgggggacgnnnnnnnnnnnnnnnnnnnnnnnnnnnnnnnnnnnnnnnnnnnnnnnnnnnnnnnnnnnnnnnnnnnnnnnnnnnnnnnnnnnnnnnnnnnnnnnnnnnnnnnnnnnnnnnnnnnnnnnnnnnnnnnnnnnnnnnnnnnnnnnnnnnnnnnnnnnnnnnnnnnnnnnnnnnnnnnnnnnnnnnnnnnnnnnnnnnnnnnnnnnnnnnnnnnnnnnnnnnnnnnnnnnaggggggtggccgggggggggggaacgagcagcggagaccccgagagacagtggaccgcactctgcaggaactcaatcctgcatttgcacctgcaagacgagaggagaccttttccctcctgcgtccctgtacctggaggggcattgttatgtagatcgccagtcaagcacagccagccctgtgtcgtatccatgacaaagacatagtgcaagccgtgagaatatctgcacaaatccaagacaacttcaactgtgctccacagcctggccctcgcccttgcccttggccttggcctcctcttcttcctccttcttctccttctccttcatctccaaagcctccatattctcctcccacctcggaacctcaaccctcccctcccacctagcaacaacaacatcccccttccgcccaagttgggtctccgcccgttcctcctccccaccctccgctctcggcgcaatctccggagcgccatccgccccagcaaaaacagcctgcacatccagctccttcagcgcagcttcatacagcacccggatctgctcccttttctgtcgcctcaattccccaatttcagtattgccatccttatccgtccccgtagatgaagcggcagaatgtcccgtccgcacagccggcttcctcacaacacccggtccactccgctcttcgaacccgcgtagtagtccttccataattccgagtaccgtaccggcacgcatacccagttgcgcaccgacggggaagcctccgtcgaagccttcttgcacgtgcgcgcccttggaggcggacgtgccgtcgcggtagcctgctgtgacgtgttggcggcggaggctggggaggtcggagggttcggtggattgggggagtgggcttgtggctgatgggtgtggtgcgttgagggtgctttcgtatggtggggaggagccgaagatgtcgtcgagggagttgtcgtccactgcggggttgtcttgggttgacattgttgttgctggggagggtggggtggagtgggcagatgatgagtctgtgtgggctgtcattgcccaggtagtatgggttttgacttcggttatggcttgcgactgtagaggtgtcgtgggttgatctgagtttgtgaggtctgagttgaaaaaaaaaagatagcgggtcggcggggcgatccgttgatccacggaagtatgtgtatggagtttattttggagtgtttatgacctcattcaacaagtttacatcatatatatctaggttatatagatatggatacttatgtgaacaataggactaatatggtggaatgtacaggtgagttattcacttcgaccgggaatgccttccgcctgatctaagtgaagagatttctttgctgaatagtctatccctattgatcagatgagagttagcaattgctgcgtggaaatgaggctcttcagaatagggcaaaataggtggtcacgtacagttctgaaccttttgagcgataacctttcttgcaggcttccaaaataactccaaatctgcacctgggcgaggtttagagaaaccaacctcgacgacttgaaacaacacatccttgctagaaccttcgattttatcaacatctttgttggcctgggtattattaaatgcaatgaattccctggttccgacccgaacagcattcagccattcgagttgttgctcattgccataaaaggcttttgacataatttcccaatgaaaaaccagaaaggccaaggcttgttgaagtcgtaaggggttccagagatggactgcatgattgagtccagtctcttgtcagaaagccttatacaagatgagattcttaggaagagagaatacctggagggagatgttgcttactgaacaacaacatgagtgatatctggtagcagtttggaatttgtcctcgacaattatcttggctgaaggaactgggactgttatggcattatgatccggcagtgtttcatccattgtttccgtactctgtaatgactgtcaaatcgttgtctgttactccgtgcttactcttgagtgttacgaggatacctacacgtgaccaatattatgccttgttctcaatttcggttggcataaggaataaatcagtgtatctactgtcactaggtcaaaattctctcgaacgcaacccggcattcttcagatgggtttcttttctacctcgaaccgtgccgattccttcattgcagccggtacaacctcaacaatatatgccgttgacgaaaactttgtcatcaaactccgtccctcatcaggggattttcagcgccaagcttacgacactgaagttcgctcttacaagcgacttgggcaccatggacacatcgcatcttgcgaagtaaacgaggaaggtctcctactggaacgcgggatttgtcttcggaccatacttcagagtgctggaagcacttccgatggaccgtcgaaagccagggagtctccgatctctttagctacgaaacttcaatgggcgcaggaagccgcggatggtcttgcatatattcatagcaagggtattgtccatgcagatattggttgtcacaatatgactgtggacaactccaaccacgtcaagttcattgacttcgctggttccggcatcgacagtgaagccccgttagtctgctacgagtggttcagcttccaacctggtaaggaaatcggtgtatgcacggatatatttgctttcgggtcaatgctgttcgaacttgaaacagggcgtgtcccttatagcgagctggaagggactatggagatggggaacctaattacagttgttgagaacttgttcgcacagcggcagtttccatctgtggagactttggccctcgggtctgtcatttctgcttgctggaatggcaaatacaattcaatggaggaagtccatcgagatattgcgtgtcaaagtaagaattattcagagaaaagcctgtaaggttcggctgttgtgagttggtctaagcgggtcggggcgatcaatgaccaatgctatgttgggccatcttttgagactttggcccccaagcgcatcagatgatgtgcccaaagcagttagcaaccacaagcctcatgttctccatttcgatttacatgaagtctcctaagtgacaaattcacagccatgtccagacgcaccctccgtctcctaggctacaccaccgccgtcactggcataaccggctacagcatccaccgaggactaagccacctggaagaaaaatacccagcacttccccccgcagcaggcagcagagccctccgcacaccggagcacccaaatacacaacgctgcgcatataccgacatctacgccgcccaaataccgctacaagccctcgaagcacgcatcccaagcgccaagaaatcatcaaaaacagagctcgagtatgcctgggctcgatccgtgctcgggagcaagctcctacgagccgagggctctatcctcggactactcacgagcttccgcttcacgccatgcgatacaggcagctcgacaggaggattctcgccggatgaaaccaccggtgcgccgcgcgttctgctgaacggtttatttcaagtacagcgccttccggccgctgacgcggatagcaatggactgctagtctcgtcggaattgcccgacaagccccgcgtgttctttgagatgattgcgcggtgggggtatccttggcgcttgatgtcgtgtgtgaaacatgagatgagtgtttctgagccgttctggaagaatggtcaggggatgtttgttgaggtgcggtttgcaagtgcgcatgattatgagattgtggatgtggaaggtgagcttgggaaacagaagattattccggattggactttgaggttgcatcgtggatatgctaggttaattcttgattctgctgttcgagagctgcaacgggatgttgagaaatagtctcgctttcgtattgggctctcttttatacccttcgccttccaccttggagagctgaattagctgtgggtatacctcaggcctgctaacgtcggacactttggtttatgccgtaatttggtatcagaagatctattgtacactcccagggagcaatgcgacagccataccttggacttgcgatgacattcatctcgtacttagctcttcaacaagcactatatccaaacttatacacatttatctgatacaccctattcctcgccttcatcgtcacccgcatccgaaacacaagcactcccatttggaacaacggtccacgactcgaacccattgtacaaataacacacatcccagccgctggtaatgctccctagcagactatccgccccaccggagcaatcagacgagctgaacatgcaaagatcataccggttcacgtcggaggggctcttccacgagagacttttgacattcgttgagttgtagtaggtagtatctaacccctgacagtcgagcgccctcgcgccggagtagtggagaatagagtattggatattgttcacggagctgttgcaggccgggggtgctacgctgagaaaacggaaatcccactgtgaaccattagcaggtttgatttagcataattgtcggaatccggcgcgtttgacatacggctctgtaggcaagaactgtgagatcttctgggttgggtagtgcgttgacggtccagggagcgacgctaatgagcgtcaagcatgtaaggaatttcattatcttggcagaaataagactaaaaagcagggcttgggattatgcagatataaagtacaagctggagggaaatgtttatttgagatattcaggacataattgcttcttattatacggagtaccaccactcgccatcccattcagactattttaatctcaaacacctctgcacctgcagaagcggagcctgtacctccaatcacagccatcgacggccaggagagactcgatcggctcgatggccactcctttcagctgcagccagagagcagctgaaagaacatggccaaggagaagccaggacggagtaactacggggtactccacagaggggtctcgggtgagttttctcttggcgggggaaaggcacgatgctgttgggctctcattgggcgcgatattggcgagaccctggttcctgtgttcctggagggtccgatcggatatcctgcggctcacctgatctcggtggaataggatgaggtatattgaggttgttggatactcagtacatattggttgtctcgccgatttagaaggatgagcgttaacttggctcagggacgactggacgggattgtgtgcccagacatttatcgagacaccgagctgaggaacggcgaggaaaggaagtacaaaaaccgcgaaaaccttgaaattggacaaaagaagcttttttttttttaatatactatctttccggagtaacctacggagcatacaataatgcatcatgcattgtgcttcgtgacaaaaaccatacgttggtccttcaggacactgtaataacacccaagctggtgagaaagacgcctcgtctaaattatttatctattcaatctatagaatatcccagacagatggtgtacaaagacattataggccgtcacaacacaccaaaaccacggagaactgtctcacccgcgctggggattagacgtcaaccgccaagcccggcgaggcaagtcctgtagcttctgcgcagccggcttgataaacataatgaacgtaagcgtgccaatgagcacacagagtatgttggtcatatagtacccatcacggtcgatgtggcaggtaccgccgccgttcacgcagcggttcttttctggctcaagggcgcaggagaatgccgtcgtgataagagtgtctttgagagaatcggcgggtggggcgatggttgggggaagacatgttgcttgggtgaacatgtcgacgagtttgaggacgaagattcgggggaatgttccacccaggttgcaaacgctgagatgagatgttagtaatgtgtgcatgttggggggaaagggagtaggacttacgttgcgaggagggtcatgtacgtcccgccaatggctgggtcggcgattcgcgcgtggaaggccgagatggccacgaacatgaccgtgttcataaaggttgagagaacatgctcgccaattaccgtgagcatgtaccacattggcatctccgaggctgtgggatagatcatgaccgtgaattgagcgagcacggcggctgctagtcgtccgataaaagcccagccccagaggcgcattgctccgtagttggttgaccactggccggcatagtagcccagcatgatttcaaatgggaagtcgatcaacacgaccagggccatgttgtcttggccaaagcccttgtcgaggagcttgagactagtgactccgtcattggcctggaagccgatcttggcaatgaggtgaatcaggataatggtctggatgttcttcaacttcagaacgctccacatgcttttatacacatccataatgctgtcgcgttctttgctgcgttcttccttcttgaggaaggccagaccacacgtcacgatcagatacgcccagccccagaagttgagataagtgccgagagatagcagaccttcctcgccggggatagtgcgaaaccatctgttcgcaaagtccttggagttgaacgccaagaagacagtgtaggacaggaaatggcccgccgtcaacccgaccgtttgggcggtcgaggcgtaggaaatgttcggtggggacatcaaagtgatcgcccatccatctacagcgatatcctgggtggcacagaaaagcactagcataaaccaccagtatgtgaatttccagacgcccgcgccattatccgcgccggcctcgatcatcatattctctatatggctacccatatagatcatagctagtccggcgatcacctgcacgggggtgatccagctcttgcgccgcccaaagcgcgtactccacacggcatcgacaataggactccagaataacttgagcgagtatgggtatgaggcgagcgagaagattccgatctggccgtatgagaggtacggcttgagcaggaagggtacggagccggtggccaggcccatggggattccttggaggaagtatagcaggaccagcagcagaaaattgcggcgatcactgcgcggtagattgtggaacgttgtgtttgtctggattggggtttgcggcaccaggtcgttgtcgagggagaagctcggtcgcgacataagttgggctgttctatcggctgaggtctctgcggagggcgtatccctcctgcgcatttcgatattgttattcatcttgccattcgcacgtccgtttgacccggtagagactgtcaggttcgctttggaacgccgcttcgagagggtcgcgtgcttgcgtgtcattgaatgctgtgttatggtagggagcgatcgcctttgtcagcttcggcaacttcgtcctgattggatcgaggactgaagttgggtattatgtattgaatggtgaaagggatggatcgagggttcggcttcgaaggggctgcgggtttagatgctcagggtgtgctgtatgttaaattccactgagaatgaaggagtgaatgaggaatataaaagaaagaaacttcagcgaatctttagtgggggatcgttgaaccgtaggatgacaaaaaacatgaggcaagctggcctcttggctggctgcagatccggggacccgaggggttctattttaatctgcctggatggaaaatggtcgatgggaatggacacaatctgagtctgagtctgatattgatgtttttgatatgtatattctctcttgtaacacaaatagcacgttccctatgaggtcaccacatcaacacggtaggactgcaggggtcagatctataaacccaaactccaatttaaacacctttgaggcttagtctcaggatttcttcagatcttgcataagaaaagaacaaactgatgatctcagcccactccgcccactccgtaagcccaagcttctgcagaatcgcgtcagatgttgatgagatcacgtgtcaaaataaactatgacaacataaggatcagaatcaccgcgcgaacctcaccagctccccaaccaatatccaaaatgacatctcgcgttcccacatcaccagagccagaagaagtggagctagacacagaaatcgcctcaatccgcgcagaaagtaagcatcccaatcccaatcccaatcccaatccaagctaaatcaacaaagtccaaaccctccgaaaacgcaagcgcatcctcacatccagcctcataacaaccgacacaattcaaaacctcctcaagaaacctcaacccccaaccaccaaaacaaccccaacagaccccctcaccacaatctccccgctcgtccacgccgccggcgcccacacctcctcaaaccaccaccgcatcgccttcggcgcaaccgccttcccattcaaagacccatccgcaacagccagcgcgaaacccctcctcggcgtgcgtatcgacgtatgcacgcgcaatggccgcttcgcgaaaccatactacatcctcctcaaacaggagcggggtcgcgcagggcccgagtcgggtcccaagatgttgaaagtgcatcggcatacagtgccggggtttatatcgatggcgaagctagagggtgtgtatctaccgcggcctggtgtgatgcgcgacaatggagatgcggatggaggttcatctggcggggatgaggatgaggacgctgaacctgtgaagctggggaagaagagcggccggaggcaggatcttcgcgggtttgtgcgcgagcttcggagggagcttgttgcgtggcatatgcgtgttgatgctgttgagttcctgcgcgagaaattgggccttgttggtgaagacggcgggtccttgccgtttgatgtttcgccggatcgcgatacgggcattgtgtctttggctgctgttgcagttgaggcgcggtatgtgcgtgttgagtgggttgatgggcgggttgggcggttcaagttgtctaatgctggagtcgtggagcgggcggttgttattggtgatgagggtcgggataagaaggtcgaggatgcgatgactggtggtggtgggcgggttgagacggttttggataggttgagggttgatgtgttgtctggagcaccggcgctatgagatgttgttttactttgtttttcagcaagagataccccaatgtcaattttgaatgttcgaagcaaattaacttgaattccagagcagctaaattataaacaggttggtatatctattcaatggtctccaccaaatgctacgcaatcatgagacccagaagccgtcgtgatgcgtgaatgtgtactccgtacgtgactgtcaattcaaaagcagaaagtttattacaagggcaaggggcaacatggacagaaggatggggtattataagggtatatagagtagatgtcgtgtcgtcgtctccaattagagaggcacacaatccttgggatggattgtatcgggggttgaatcgggggttgaagtttctagtggtgagcgttccttaacagaaatgggggtattgggggtagtgaaagcgacaagcggcaaaggaccatatgactggccatgtcgcacctcgagatgccgacgtagcacagcctcttccaaataccaacggtgccgtagagtcgtcttcttcgtttccagagcttgcatgagagagtttacttctcgttggtgctcgagctgcaaggccgcagcatctttgatgtgtcgtttacacatttcatccagttctttttccatacgcgcggtggcttcctggagcttgagctcttggcggtcacggaggactttgatgcgggcgtgatggagctggtccatggtcttgtgggagtggtattgttgttctagctgctccatgtgtcggcgcgtgagcacacgagctggcgcggtagagtcggattccgagagagattccgatgaccgttcggatcgttcggatcgttcggctctgatcagtgttccggcgggagatggcggcgggctggcattgcggagatatccttccatatgcttgatgcgggtgcgcgagttcattttggcgcgatcgaactcgcgttgctgttcgatttctaccgccagctgtcgctcttcgatttgggctatagcttggatattctgcacaaacgcttgttagtaaaaataaattaagatcccaatgtcgtaaagcgaaccttttcgcgtttctcatcctcctggcgctgattgtcagactgttgctccgagacagcggtctggtgccgacgccggagggtacttagagcggcgtgttggaaagcgagatgtcggttcctttccatctgatgccgctcatgcatctcgcttaagtccggatcctccagacttctttgtagttcttctttgctgaaccgaggtatttccaaccggggaagtgttacctcattgctcgcgtggggtataacattttcatgggcagcaatgacaggttccggcttgggttcgaagaaaacatgttcaaggtctttgtcgctcgtggatacagttatgcgatcttccgaaggcaagaaaatggccgaggacgtgcgtttcttgcggaaattaatcctcccgatagcagacttgaagctgctccgtcgcctccccttcttgtcgtccgacgcgacgctgagaattgaatgccgatgcaagttggcaaacggatcattataccccggcgctaaaaggcctgttctcccctcactggagcaaaacgaagtcgggcgcgtagacagcgaagccagcgatcgcgtactgccagtcttgatgcgatccgaggaaagcgcgacatccgacagcgaggagacaatatcatcgagcacggatggcacgggggaggacggctcgtgggacggggtgacggagccgcacacagaattccgatcggtcgacgatccagaagacaggactggcgaggaaagatcgaccattcctgaggcgatcgaggcggccagtggcgcagaagctgcgatctctggcactttcagacccagttgttgagcctcctcggctaggtgctgcgcctgcgctgcctcggattccggggaggggtggtggaggacatcggtgcgatattgggcctcatcgaagatgggcccggtgtgtgactccattgtatgtacaattataggaggtatgtggcgcctaaccagcgggcgcacatgaaattccaggtccgggagagagctaagaataataccggttccacatggatgcgttctatgacggcatccagggaatctaaggatgaggggttgtaaggacagtattaagagttgaagggtggaggtcagaggtccaagctaaaaggttcggggccgaaaagggtagaaaggggaaaacaaagcgcagacgacggttatggccgtttccttgtttcctcatgtttggtcgttttaggcaattttgggaaaaaaaggaaaataatcacctccgacccacgggtggtcctgacgccatccatggttctacgccggggatcgcagtgaaacgggcaattgcatgagagatcgatctagctctaacggttatatcggctttatgctttatttacacatccctgcacctgcattcccaaggtatacgcttccatacgctggatcccgggcatccctacggatagataacgcccctcgatccaggccatatgaagaaggtagggcttagggctacttaaattgcctcggtcccatggaaaggacggatcagcccatagatcaggccatttagagacctcctatctaggtagttcaatacaacatatgtatgtagccaaggaataaccctactcgttcaacatgtcgcatgccagttgataggcccgctctttagcttggtattgcggagtccccgccctcgtctttttatccttatcccatccatgactacaaccccgcatgcgctcactgaccacatgccggcctggcaacgtcttgatcctctcagccaattcctcgccctcgggtgcgagagtatcaccatcggcggtgatcattagaacacgtcgtgggaatcgatccgccggagcataagtcggtgaaatgcgtgggtcccgcttgtcgaaggatgggggtacgtagcagcggtcgaagaggcgcatgagagcaagaggaatgacgaaatctgcacgggccggggcgatctttgctccaggatcagagcctatgtcggtcacaggatagaatgctagcagggagcggaaggtctcgggagggaagaggtttgacgcagtcgccagcgcgaggttggccccagcactaaatccagacatggatactcgggtgaggtcgaattcatccggacgcgtgagcacgtatttgacagcgtcttccacgtcgttcagtgcggcggggaacgggtgttcgggggccagacgataggagacgtctaagacagtgtacttcgtttcctggctgattcgtcgacaaaatccatcgtcgccgccatggagcggtaccaagaagccaccctcgtggaagttgaggaggacgggtgacgggcctgagtcagaggactgatacagatgaatcttgatggttcggccagcatcccgggatttgatatggcggacttcatctggactggccgataccttcatggtaagacgcaccattgtgcgaacgagaaacacaaagcatttgttatagtagtacatgagaatatccatggttggcgtgagatgctgtatggcgtgagacgatgtagtagttatgttgaagctgagtctcaccggaggccgggatttgaaaggccactgctgacctcccccctcttctagtctattctagtttctgacatcttacagcccgtagatatccaattagaaatgattaacatgtactttttcttatttctacctaatatattccacccaattataaggcatattcaggccagaatctcaaggcacccctgcattacacagtgtaactttatccggataatctgataccttcatcccattgtttgcaaataatctacttgtataatctccgtgatgtgaaccatagctgttctagtgcgttggtatatctcaccgctcgtggcggtattgagccccttatcaattagctctcaattccccgcattaggacaattccacgcagagcctcattgccttccacgcacccgtccaccaatcagaatgaccggtttctgtcgtcacgctcatctccaacacccatcgccatcgcatctatcgttccccttttagagacccaagttgtctgagaaacaaccatcctagtttccaagcccacgacttttgagtttcattaaccaaacaaagactacttaatgagcttggacaggagtcctgagagacctcgctttcaacatcatatcatctacacgcgattttaggatgcccgtcaacactaatttcacagtcttcatacgcttaccatttccaagaggcgactttgtcgatccgccacctgcaagtctccccaaaaagacccctggagcatccactgacataaacaggtggaatggaatgcatccaaagatcaagcattatgggatatcctttctcggccatctaaaggtgacatagactgtatgtattggtgttgctttgagaccttgctttgatatcgctgacatcatcacagggaaagctctgtaactggactctgcccctgacactttagcttggagctgctaacacgcttgtttagggcagagaacttcgatgtcaccttgcagttcctccttcagcaggcagcatggctctatgatcgccagctatcgcaggttcgggctcaaatgcgcaaggtcggcactacacagtcgaactccccttccccggctccaggatctgtgtctggtagtacagcattgggtggacagtcacagagagaaacaccagcaccaggtatatcctagcttgctttatgttctttcttgtctatggtctgagactgatgaccagcaggttctcgggcgccatcccggcaagtatctcatccgaaagatatccctctacgaggtatggaccgaaaccctacccgtcttcgcacaggccatttggtaccgccggtggatcgatcacgtttaacattgactgcagcccctgagaaccgacgtaccagctttacatcaactacgcctactaacctcacccgcggacctcgggaccctacacgcaccgccacgccgacaatcgatgacaaagaatcacgctgggattctttggctcaccggccttcggctgtgagacgagaacaaccaccggtcgcgtctttgcccagatcttcgccactcgaggaagagtctctgtcctcgagctcatcggaagaatcagcatccgacgacgataacacaaacagacgtgcacccctgttcaaacggtttggcaaattttctactcatcgtctacgggatgatgaggacgacgaagaagatactccagccttcctgcccctatcccgcgaacatgggcgtatccatcgggaccggtcaggccaggaactcagcgccacactccgtttagatgccgagcgagcagcggcgcaacggcgacaccccgagcagcggcctaatcctagggtaccggcaccaacggactcatctacaagctcaatcagctccggtggacgtagcagcctacccggtggacccaggcggaccagccaggggggatcgatgctgagccctgccgaacgccagaattcgcgcaagtccaccgcctccggtcgcgaagctagcgatggtactcccagcatgggaagcagcttcagtgacctcgacggtatgtgtcccaacccccaggattctggatttcaactgatcgactggtcagatgcaagtgttacccagtcagccctggaggaggcccttctaagcaacatgcagcatggtggaatggcgagtcggatgagcactatcagccaagccttgcgcagccggtatctgcagtgaaatgcatcttacataggaatatctattttgacaggttgcactacaacgtagtatgtgtacaacatatgatgtagctcatgtggggtgcctgactgtgttcccgcatatggcctccacgtgaccgagtggcgcctcggcatctcggtggtacgttccagtgacatagtggcattatggatatcttcactttgtccggagttccctatactcagatattccaggtattcactgtcacgcatcggtcagacgggagcgctagtgccggatcaggtcgttcagtctcaacgcccagaggagacatatgatggaggggtagctcaacctagctacctagttacgtttaaaacgttgaatgttcaacataaagaactgttggatattgtgaataacgagattcttggccgatcctgaaaagctgaccggcatcaaagaacaccgactacaaccccaccaaggttaggacgccgagcggcatcctcggcatctcgtcgactacactcaccggcagttcttcgattcacaattgtccaaccccttttctccgttgcaaagcgtctataccatcattcaaaacaatggcacccccattagtgggcgacatgcccccagcggaggcagagtcggtctatttcaatgaataccccccaccaaaggcactgccacgccatgaagcgctcgcgcgcgcattcattgacctgcacgtggaggcacaccggcgtgtagtactcgtcacatctggaggaacaacggtaccacttgaagcgcaaaccgtacgattcatcgacaacttctccgccggcactcgtggcgccacatcggccgagtacttcctcgagcaggggtacgcagtgatcttcctacaccgacaatacagtctgctaccgtactcgcggcactacagccactcgaccaattgcttcctagacttcatggatgagaagccggcgtcggcggactcctccaaccctggccatggacccatcatggtgcgcgacgagtaccaagacgagatgcgcagcgtgctgcggaaataccggtatgcgaagcagaacaacctcttgctgctgctgccgttcacgacagtctcggaatacatgttcgagctgcgggcaattgcgaagctgatgcggccgcttggctcgaatgcgctcttttacctcgcggctgccgtcagcgatttcttcattcctcgcagtcgcatggcagagcacaagatccagtctggggagttgcctccgcacatgcagggcagtgcaatctcatcggatgaaatctatacgggtgagaatgaagaaaatccttcgcatagccggaagctcgtcgtcaacctcgaccccgtgcccaagttcctgcaccagttggtagatggctgggctcccgaggggagtatggttgtttcgtttaagttggagacggatccgtcgctgcttgtgtacaaggcgcgcgctgcgctgcagcgctactcccaccacttggtgattggcaatttgctttccacacgcaagtgggaggtggttttcattacccccgatgagccgtatgagcgctggcttcgggttccgaagtccaaacgcagcaagagtatctctggggttgaggatcaggttgggttggcggaagctaataaggcggattcgtcgacggtggagcagacggaggctaaacagattgatgagaacagtcgggatggaattgagattgagagtctcattatcccggagttggttaagctgcatactaaaatgatcgagaagaacaagcaacctgcgcagtgatatttcttggatgtacaattcaatgtgaataaataatgagtcttctcgggtcttttagttgaattaattaatactgacatgggttcgatgtagtactatgtatgtctatgactttatatatcattcttacagctagatcgttgcatgcactcatttttgagatattcaacccgctatcagtgttactcacacactatgaactattttcctttttgtgatgtcttctatactgcttttgaaggattgtatcaccatcattgaaagactgtatacgactaaatcgtgtacacttaggtactttctgtatatgtatatgtgactactctcaactcttgaatgcttcagattcgactactcaacacgtcatgatatctccgtgctgatcctggtggaccctgacatcgtgcgggaccccggagctcttcacccctgaagtgaagccttggaatatctctcatttatagcaagggatcaccatatctcaaacaacatatattggattcaaggggcagctatttaaaacctccaaattccatctgggctacgcgtcccgatgtgtcagcggcaaacttcggcggcgatcttccttagctccgacctttccccagtaatttgctcttttggttaacaggagaggggggaaaagatctattttcaagcactgttctggagaaaagatgatcaattgatctattctctgtttggtgtactcaattttctcaggatggtgtcccgccggttcagccgtcgcctgattgtagttgcaaccgtcgttgcgctcatcttcctctacaatatcggcttcctctccagtcacaatcgccaatggcgccctcacttcacacctacgccggaaatcaccccggccctcgatgagaatggtgaaccaaccacatactgcccacccctacccggcgtcgaagatgtgctcgtggtaatgaagaccggagtgaccgaatcgcgcgagaaagtccccatccacttccgaacaaccctacgatgcatcccccactttgtaatctactccgacttcgccgaagaaatcgagggcgtccagatccacgatgtcctcggcaacatggacagcgccgcaaagaaaaacccggactttgacttctaccaccgcatcgtgaaatacggccgcaagggtctggagcaacacgatttctccgacgaagccaactccgccatcggaaaacccaacaatccaggctggaagcttgacaaatggaaattcctcccgatggcccaggaagcgctccgctacaagccggacgcgaaatggttcatcttcgtcgaagcggacacgtacatctcatggccaacagtcctaacctggctggcccggttcgaccacaccaagccacactatctcggcacggagactcagatcgcggacgtcatcttcgcccacggtggctcgggcttcatgctctccaatcccgccctacagcgcgcctccgacgagtacaccgcccgcgaggtcgagctgaacgaatatacagaccagcactgggccggcgactgcgtgctgggtaaggtcctcagcgacgcaggcgtcaatctacactttacatggccgatccttcaaaactccaacctcggcgaactggacgagttcaccacggacttctaccgaagaccatggtgtttcatcgccgcaaccctgcaccacctctccccaaccgagatcgagagcctctggaaattcgaacaaaagcgctggcgtgatgtgagtgaacccaatccattctaccactccataacattgaaaaaaattcctaaccaataacccattatagaaaaataaacgcatcctcctgcacagcgacctcttccgcgaatacatagccccgcaaatagaagcacaacccgcacgtacgaactggaacaacatggcagacgaagaacagcccttcgcatacacacccgacgactgccgcttgatctgcgagacgcagaccacttgcgtgcaatttgccttccgcgaagataaatgcttcacgagtctcaacccgcgtctcggacatgccgttccgggcggtgttgcgacgtccggctggaatactagtcggatccgcgatatgacggcgaagaagggagtttgtcggaagcctgatttcggggattgaggtgtaccgtgctgagatatttttgggggtttttttggtttccgggggtgcgtgttattatatgttggttttttgccatgtacgtggttttcttatttgggtttatattgctttgcatcgagagcgagaaatgggcacgatttggcgattgcttgggcttggagcccggtctgatatttggcatacggggtgatttgggtcggttggaacctgcatttttttttctcctctgtgcatgtactaccatcttctgggacctgtggctgatgatgagcttgaatagacaagctgtgttagtggcgttggtgcttggttgaacccttcttatatacttgatcgctcaatacacatcttgatcaaattacacagaaacccatcttttcctgtggaatcacaactttgcttcgtcattgatctactgttcaacgaggtaactggaaaatagcaagaaacgaataagaatagcattgcttgggcgatgtcaaccaccaattaggagagagtacactaagaatatttacaggacaagtcctgctgtgcgtctgtacagatttcacggcgttatccatttacaacggtggagcggacgcatcctccatacactggtcgattcgcatgatgtggtatccggctcttttgacatgccgaatgaactccggtagatacccaatagtagtcggattcaggtagtgcatgacggcaagattcccgcccttgccaacactgcggacgaaggcttcaagctgcttctctggggtagttgtgtttgcccatagccagtcttcgacgtccacactccagttcacaatgtacgggtttggtatgtgtcgggctagctcctggcgcatccgggcagctactgtaccgaatggtgggcggaagtatgaagctacaaatattcactgtcagatgattctcggggatgcatcaggggcaaacatacacttgatgtccagccggtccctaaagatttgcatggactggatgatctcgtcatcaatctggctgagagttggcaatgcttccatccttgaatcaccatgtcagccctcttcacatgaaaccgaatatttggaatagacttactttgggtgggtgttcgaatggagcgccacttggtgacccttcctcaacatttccctataaaactccgtgaaattggtcgtccgatccctgagcccagcaccaacaacgaaaaaagtgacccgcacatcttcgtcgtcaaggatacgcatgacctgctgagagtactgcggctgtccatcatcgataccaaatgcaaatgaattcggacgcgaacaacggagaaccaatctcccactaggcagcttcccaggcacccgataatgactattctcctgcgatggcgctggaacattaggcacgatctccacatgatgcagagtcagaggttccttagtatagaagccatggaacgaaatcgacaccacgcgattgaaatcgatattgaaatgagacagaggtatatagagctcacgacggcctgctggaatgtgggcattgccatgggggcgcttgcgtcgaccgcccttgtgttttctatgcttgtgcttcttcctcccagcatcggccttaacatcgtcatcgtcatccgagtcatcgtcaccatcttcgtcccaatcatcatccgagtcataggcttcagaggcagggtgaaccacataccgctctgcctggacggagtctgcaattccggggaagggactgcgttgagaactacattcgtcgttgtgttggttaaaagagacgctgtacttatccgtgccttcgaatatgacatgcaagtactcgttgtgccagggaaccaggctgtagcaggcgttggaatcgaactgggtatggaagttctcgtccgggtctgttgggaacagacgaatgaagcccggtccatattccacgggtaaatcctcgccggaaccgtgccagaatcccaggtcgttgcgagttgggtttttgaaagtgtcgatgacaaaaggggcgcttgacttctttatctgcgaggcattggacgaatctctgtgggtaagccctcggagttcattccagtggccatggtcaacatttccgtgaaatacagctgaggttgggaaggatagcgaaagagcggcacaacctataaataaccaatgcatgataaaaaactgccttgaaaaaaagattgaatgtgctttgaagaggtcaaggtggaagttgtaaaatgcatcgtttatgtactcggcgcagtctgcctgggcaaaaagtcaagaacgattgactacaaatctaaaggcaggagctgtatgtcccaagtctgtacatctctacatgcctactctctacaatttaccagggaattgaaaaatgaaactagatagttgcataaaacccatgaaatccgtaaagcggcacatctgtctgaccttgccatccatatcactgcattggcactcacgctaaaaccgatcctgatccaagatcaaggaggaaaggtcttatgttccacagatccaggttgcatatcgtcaagagatcaagccctcaaaacttcttcggggtgtgagatctgatcctggtcatccagggtaaaatttcgaacttggtaaaaatcatcctctccaccttggacttctttcgtttccatttttttgttgaattttctgttttttccttgtcattgtcgtttgtgtttgttgagaaaggtcctctaggcccagaattcgtcatcttccttgggagcaggggccttgggggcccagtgagaaccggccagaccagccttgtccttgcgcttggctttctcatcctgctgcttcttgtgttcgcgaacgggaaggttcaaggcagaagcctcctcttcctcggacttaacagtgggcttggggacggtgtgcttggcagcagtgcctttggcaacagtgggcttggcaatagcgggctcggtaaaagcgggatcgtcgttgtaaacaaaatcgtcatcattgacaggctcgttattggcctcttcagcatcgcttgcagccccgttagcactctcctcaacctcgtcaggttcagcgaaagaagtttcttcctcagcttcagcatcagcctcagcattggattcagcatcagcgttggattcagcgtcagtgttcgattcagcttcaccatcagcgtcagaaccagcgttagatccgtcttcaaagaattccttatcagagtcatcgtcaaactccagaacatcgtcctgagggcggtatgattcgaggaactccgggacgacttgattgcattcgaccaggatcttcacaagatcctcagcaatatcctcatcgcgttcattgtagaaagaggtggcgatgccttcgtttccaatgcgagcagtacgacctgtgggtggcaaagaaaagattagtggcaagttcatcaggagtatcggggaaaagcaatatctggagtaacacataccaatacggtgaatgtattcagtgatacctccgtgcgccgcgctggggagatcgtagttcacgacgtggagcacgttgatcacatcgagtccacgagcagagacgccagtagcgatcatgacgggacacttcgcagatcggaaggcacgcctaatttggtgggtcagcaaagcaaaataagagagggcagggaacaaatactcacatcgcatcctcacgctcacgctgagtccgtccaccatgaatcgaggtggtgggcattccagagttgtaaaggtaatcatcgacaaagtcaacctgatccttgctgttgacaaaaatcaaggtgcgaacaggaggcatgctgatcagaaggtcatagacggcgcgcatcttcttgtccttgtcaacccaaacgatcttcaagtttcactaagcgttagctcgaattccacaaggtttctcccaatcttagtggttcacatacatcctgcacaacattgtggtgcgaactgccggctcggccaacgcgaaggcgcacatggtcctggctaaggtattgctttgcaagtttccggaagtccttgttgaaggtagcggagaacatcaagtagcggtgatcatcatcctcgttgatatcttcttcgagttagcaacactgaaacgcataaaggtggggtcgagagagcgccatagcaaacacttacctcctccagacatgatcttcttgaactcgtcctcccagtcggattcgagcatctcatccgcctcgtcaatgacggtgtatctgaaacctcattagtatccaatgactatggatgcatatcaagtgagttgcaatcatacctaacgcggcgcagagaaagaacatgagtctgtgccatgaaatcgagaagacggccgggagtggcaatcagaatgtcgcatcctttctgaagctcctcacgctggacacgagtaggggcaccgccataaacgacacacggacgcagcatggagcgatagcacaaacgacgcgcttcatcaaatatctgagttgccaactctcgagtggggcagacgatcagaaccagcggctctgctcgaacagcatcctcccggaggctaaagttcgccgtcgtgttaggacgaggagcagccagctttctcgccttgcccatcaacttggaaataatcggaatgaggaaggcccccgtctttccagagcctatgaaaattccgttaggaccaacttttgtcaaacatcagactgcgcaacacataccagtttgagcgactgcaataagatcaagattggctagaacagccgggattgcataagactgcactgcagtaggttggtcatagccgcagagacgaatgttgtcgagcatgaccggatgcaagccaaagtttgcccactatagatcgttagactggaacattgtcgctaactcatctcgcagactgacctcggtaactgccttgatctcgttaggactttcaatgttgaccttgtatctgttcaacctggagaagaagtcatgttagatatcaagttgatgtcccatcggatatgtcacttactcgtcgagcttggcgccagctcgagtaatcagctcgccatggaaaagctggtcctccaattcagggacggctgggccgacatcgccgtagtcatcctgccattcgtaacgggcagcaactccagcccagtcacgatgatccttgctgttagcaagctcggcatactcgaaaggaactggatcagtccagcccttgtcacgagcgaccttttgagcagcctcagggttgggaccgacaccagaaagaacgccggcaggcgcctcttcagcggcggaaccatgaacagaagcaacatcagcgtccaagacggagccagctgagccaatggctgagccagcaactgagccggcagccgagtcggcaaccgacacagcatcaggctcgtcgtaagatgaatccattgtacacgaaagtgtctcagatgattgggttcaagagaggcgatgaggtagagaacagggtggtggggagaagaggaaaggaaagggaaatgggcgaccgtggggttttatgtccgtacaagagcaaacgcagaaacgcgtgtagggcttaaacaagtgaatatggcgcgcaattgctttgtcggtcgccgactcagcgagtactcgattggtgactgcgatattgcgggaagtccgaagtatagggaagtgaaccggatgtacctttcccgactaggaaggagcgatccaggtatacttctatcctcatacaattcactactggtatggatgtacatggtctaacctttgctactactgtgctaaccattgagcttagcactttgatatgtgcagagtagtttgctttaacattcaatatcaagccgtctttcatctacctttgtctttctatacattcactcaagatatgcacctatacttatgctatatcggttttaagtacctcattctcaattctgatgcgacaaatgagaccttataaaagaaagcggactccttcttagcagcatatatatacttgctaatcattcagcgtagtactttgatgtaactatacagagtggtttgcctcaatcaatatcacgccgtctttcacctcctttgtctttcagctgcatattctactgatatatgcacctattactatgtccggtttaagtagtgattctcaattctgaatgtgaccttatgaaagaaagcagactccctcttagcatgtgtatacttccccaggctatccattagggcacgatcgacaaacctcgggacgttagctcctcggcttcccagggtgagaaagtggaccctcccgtagcccgtttcgggtagaaggagatatacgcagtaagcctgggaacgggtatcctcttcatctccagtgattccacctaggtaacccctgcacaacactcaccatggcctccgaacgaatggaggtcgataccaatgctcgccgcaagcgtccgaaccgcttggaagctgccatcaccaatcccggcgctgtcaaaatcaacgtcacgggcgcattcattgtcgacgacgaaccccgatccaagagtcccgtcgaagcagagggcgtacactatgagaacaaggacatccgacttccgcatcatacaggcgtcgtgagccatgtggctgtcgatgtgagttgcccggaatttattttctctcgtgccccgcactgcgaccggttcccccgcaatctagcggcctgcagataatttgttcacgatgctagaagaaggcatggctaatacagcattgggacctggtagattggcggaacacttgcgaagcttgtttatttcactcgagagctagagaccgcggataacggtggccgactcaatttcctcaacttcgaaacccaccggatcgatctgtgcatcaacttcattagacatcttaaggaggaacacgagaagcgcaatggctcaacacgggagggactatgtgtggtagctactgggggtggtgcatacaaatactacgatcggctgaaagaagaattaaacgttaatattctacgggaggaggagatggaatgtctgatcattggtaagtcgtggaacctgcacaagcatagagcatactatctaacatctccaaaaggactggactttttcattaccgaaattcccaacgaagtcttcacttacagcgacaccgatgctgagccactgcaatatgccgaagctcggcccgatgtctatccttacctcctcgtcaatataggatcaggtgtgtcgatgataaaagtctccggtccgaggcaattcgagcgtgtcggtggaacacatctcggtggtggaacgttctggggcattatgtcgttgttgaccggctcccggaccttcgacgacatgctagcaatggccgaccgcggagacaacagtgcagtggacatgcttgttggagatatctacggcatggactacaccaagattggtttgaagagcacagctattgccagtacttttgggaaggtgctgcggttgaaaaacgatgccgaacaagtggccgaggacggcgagggcttgattcgcgacgaccccagtgaagctagcgagtccaaccatggaatcaagcccaaaccggaagatatgagcaggagtctcctctatgccatcaggtatgtttcattatttccattcctatttccattctccgacggtctccgaactaacccggattagtaataatattggtcagatcgcatatctgcagtcagaaaaacactcagtcaaacatatttacttcggaggctcattcattcggggccaccggcaaacgatgaacaccctctcctacgccatccgcttctggtccaagggcgagaagcatgcgtatttcctgcgccacgagggctacctaggcgccgttggtgccttcatccaacgacagccgcaaaactggggccgcagaaacagtgttgacgacgttgtcgcaccgcaggcggtccggaacatcgttcaaaatagccatgtccttcagcaacatggcaggtcgtccagtgatctataaaatttgtgccagactaaaccattgtgaccctaccctctctttgctttgagtcctgataccccttgcaagcaatctttgaactaccaatattgtgccgagttcttttgtgcacccaaagtggctgctttaattggccacctgtgaaaaaccaacgtggcgattccgggcatttgtgcatgttgtacacttagatctatctgaagctttctagcttcctgtttgaatccaaacatgttcggttatcatgttagagaaataaatctaatatttcattccttttccgggcgtgtgccttgacatccgcctacgcgagattatccaattccgtgagaagatcgagttcgataaaaacggtggctttgttacgccaccgcttggagttgctctatcgaatgccctggttttcctggctatcgcctacatcgtgcccattcgccagcgcaaggcaaagtggccggctgacttcagtaccgacggggatctttacccggagaggtggccgaggggatgtatcattgtgctttgggcttttgggttgccgtttatccagagttactggaactcggaacagatatctcctatcagtccttcctggcgggggtagctctctcttcgaaagttgccacagtggtaccttatctcctggttgatccaagatttcacgcgaaaagtcggcttctgtcttcaggttcggggcgttcccttagatgacgaagaagcgaagctgtgccagccgaatatcgacgtcaagcgaggcttatctgcacttggtaggtgtgatcgatcccttctggcactcctggaacaaagattggcttgcgcggtagatcttgaggttttgctatcagatttgatttggtttcataggcttgatcatctccttatctagctataacgctgaaatgtaggaaaagatattaaacaaagacgtctcttataaaaagacattttgaaagacatttaacacgacatattgaataatcattcttggtctacaatgtaaaacatcacgttagagagacaatgatctcgccttagttctctcagtttgcatctgataatggattgcttgtgtttgcaatgcatgtgatgttgtcgaggggacgcccatttttactttcctggtattgtttgttcctgtctgctgtcacctaagtctcaccttcacattcatttgtgtgtctcacattcactcttattactgtggcttctcgtgtatttccccgcgcgtctttctaccttttacttgactattctatccttatctattctatccttattcttacaaatacggaggacttctctcaacttaaaagcctcatggcgcaatctccggctgctcaggatgcatctcgtctgtcgcctttccaggttgaggtgaccgagtatgcttgtccggactctgttctcgaagcaccggaagaaacccacgaacgactacgaacctcaacgccatcctatctcactgagatggacgagtcgatgctggaagatccgtcggatactgccacggtatcacagtcagtctcgaccgagagtcatttcatcagttctacagccccgcgtgtcagctatgaagtcaccgcgtctggcgaactcatgataacggaaggaatccaaacttccaacccaaccacacctgctcgtgggccccggcctagtcctcctcctgcattcgtatcctttgataggattgcccagggattaccgccaaagccggcatcctcatctaccacagcaacaactcaccctccatccctgtcagtggagcgcctcatcggcccaaagcagccgatccccgcgcgaatcctcgatcttctcgagcaatggcatgaggctgaacccaacaccgagcatcccgctgctctgactggccgtgctccatcaacatggaagaacttcagggctttcagtgatgatgccgacgagtgcgagctatcggtcttccagatattgctcaaatgtcaaaaccggcgcatcctctcgtatcgcattatgatacttcattcccagaatggaccagaggagctcgtcgtcttcggccaaccccggccgaagttcaagggaccctggaataagggtgtcaaggggctgtacctactggactggtcggaaatcgagaagaaaggagaggttcgggcgtgcggtatcaaactgtggagaaccgatgacaagaatattgcgttcagtgcctacatgtttgacgatggacgaaagtgcacccgcttcctcgatcacaatgctggaaataagcaagcctcatcttctactcccaagaaacagtctgacggaaatgagcatgttgaggacacccagtccatctcatccgagccaccgttttccccctcgagatctggacaccaaattcccagcagtctttccagagctgagaatgaaactgaagacagaaccccacgtgcctcacggtgggatcacccttcccccatgtgggctaagtccatctcacccgtccccactcccaataattacgatggattccgttctcttgcgagcccttggaagccccaaaagaggcgccggagttcatggagctccaatgaccaagactctgatcctattcgcttcaagttgatgtcggacgtgtctgataaagtccgcgttttcaagacacttgacgcgaaggtgttgtttgaaaaggcccgggagttctacaagggcgtggataaccgcacaggactgttgtgtactgtttctggtctcgacggagcccgatacgtgggggatgggtgtgtggatgaatttgatatccttcaggaggatattatgaagtcttcttgtggcgatcaagatcgcgtggttgaagtgaagcccgcaatgggcttctagatggccaaaatgggcttgtgggattgtgtgtggcggtaactttggccaatctctgcttctcgtctttcttgatgttgttggcctggtgtggtggttggcctagtggccattgtggtgatttcggccagtttattctgcaccggaaagcttcatccaaatcttttgtatctcgcctgcgcgtgtatgtatctgtacctaattcaaataaatgcaagaaaaaaaagaaatattacatttgtcagattatcccatgacccatgtaatcaactaacaacatccctctctaaattatgctgttattctttggcatagtccccattgatgtcaattatatatatttgaagtgaacaagttgtatataagctaggatgagctatgaatatttgacctcgctataccgggatacacaagctaaatacagtctacacctttaaaattgaaagcgtccgaggccttctatcccataagaaacgaatcccagcgactcatccaaccagaagaaagggctgacatggtcacgtgtagatatagctcactgctgaatcagcatctagatgcacgcgggttgcgccctcgttgacaacagccgtcacatctaccttacacatcgggcttaatttcttctcacaccatgccgcgacgctagttctacctttgcccgatgacgtctcctccttcgctagactccttcgctcccccaatccccgtcgaaacccatccaaaccgcaccccggagtctcctgagctcgaacggtccctgcccgatcccaatcgattagcgcccgaggatgcgtacttcgcaaacccactcttgcgcgcccgatcggcgcccagcaactaccaggaaaatttacgatcgttgaacggcgatagtagtgtgcatattgggtctgctgcggcgttgcgcaagaagttgggcggtgctggacggcgtcggaagcggaagggtgcttggaagaagttgttatgggttaagcaatcatgtatgtatgcgtgtgggtcgagaccttgtacagggcttgagcttggtgttgcgctgttgctgacggccgattcatagatcccgataactataccgacacggaaacgtttctagatcaccttcagcgcaatcctcgagtgcgtccgtatgacttctggcctctggtggctgattcgactgtgattgtgcagcatgtgtgctcggtggttatcttcgtttgctgcttcgttggcattgtccaagatcgagtgagccctgtctcgattgtctgctggggtagtgttggtaccgctatgggctggattctgtgggataattggatctggaacgagcatcaggaatccgtgcaaagtgcagatggaattactggaggtgatgatggatccagttcgacttcatttgctagccccatcgatacaccctccaatgacacacaatccgatgatccgaagacgaatgccattcatggcctggggctgtctatttccgggaatgaatcgaaagagcaactagcccgccgcagtgcggatttcagcgaaagcatcgacgctgtggctcatttgacagcgcaaagtgctgtgccgcctggcccgggcagctccatcattggcactacggacccgtcgatatcgcaatatacccaccgcgtttcgatgctatcaccgcgcaaccgccagcgcttgactacagtcaagtcggccttccttatttacttcgccctcttgggcctcagtcccatcttgaaatctcttaccaagtccaccgccagcgactctatctgggcgatgagctgctggcttttaattatgaatatattctctttcgactacgggagcggggaaggcgctggcgccaccacgaaattccctgcttctttgtccacgaacgcagccgtgatggcatcgactgtgctcgcgtcccggctgccgtctacgacacacgtgttcagtctcatgctgttctcgatggaagtattcgggctattccccatcttccggcgccaactgcgacagaaatcctggactggccatgtgctcctgacactgacccttgtgatcgttgccggtggtgctgttggtgtcacgctgagtggcggatgggcagcagccataattggatcagtcctgggaagcatcttgactgcatttgtcatgggcgggtgcagttggtggcttatcagcttgcaaaagtacaagaacgtcgtgatcggtccctgggaccctgctcggccgatcattcggcgtcactggaactaagcccatatgtgatgtcttttagcgccattgtaatatagtttgtcggcgtttggttcgatcttcttgttgcttataccccttgatcagtctatccatttgaaacatcgtggaggtttcaactgccttctttccgtgtatcagttttgccacggctcaagccggtgctcgtagagtcaggtcctgacgtgattcatattcttcaaggaatacttccagaaatcctgggcatcaaatccggttttcatttcaatgatcattaggttcaaataaggggggaatgcgggttcaagaggaatgcaagacacatctggcatactaaccttgtacattgtccaccgttgaacttgccgccatatacctgcgaaggaaaagcgtttgatatttgaaacgtttcaatcagggtcatggacccttagtctatttttgtctattctcattgggggcagtatctcgttcgaacagcctcaagggacttggcattccgcagccactcatttagcgcctagaacccttttttcccccagggggctttctgactccattgattgaccagacagctggccactgatacgacattcccaaacggaatggtccacatgccccgcatgcacagagacacatgttcgacggcctgagacgattatcctggcatgtctttgtgcagaacaggaatataaacctgaccttcttctgttcctgatgtctgtctctattcttccttctgcttactttgttcgcggcttgaagctgcttctcgactctcaacgacaggctggatatctgtttatacattctttcctgatccctggatctaccttacgacctgataaacatatcgtaacgaccgtcatctaattgattccatcatgttaaaacgactcgcacttggcctgctggccgctcagtccgtggctgccacgcgctttgccatgtacatcgacgagttagtacaaacttgcggaattgatctacataccctgaacccacagctaatacttgcccaagataccatgtaaccgctctgccgggccagaaccagaccgagggtatcgactatgcaattatgagcttcgctgcctcgaagctattcaactcagactcgcccgcagcatacaagccatttgagtcgcccgagaccatgcgcaagcgcttcagctccggtaccaagctaatggtcgctattggcggctggggcgacaccgctggcttctctgagggagcaaaggatgcggcttcgcgcacgcgatatgccaagaatgtcgcttccatgctcgacgcaaatggattcgacggtgtcggtaagatatcccaacaatgcgttctggatataaaagaagaagcaaggtactaacctatatgaacagacattgactgggaataccctggcggtaacggccaagactacaaagacgtgcccaactcgaagaaagtggacgaaatcgaaacctaccctcttttcctcgaagctgtccgcaaagcaatcggcaacaagaccctctctattgcagtgcccggccgtaagcaggacttcattgccttcactaaggagcagggtcctaagatcttcaagtctgtcgatatggtcaatgtcatgtcctatgatctgattaaccgccgtgataacgttaccggccacgctagcggtgtccagggatccttggataccattaacgagtatatcgccatcggggctgatcctgcaaagctcaaccttggcttcgcgtactacgcgaagtggtttaccaccgaccccaattccgattgtgatgagaaccctctcggctgccatcttgccaagctcgaaaacgacgatggaacagacaatggcaagtctggtgctatgactttcgaagctagtactgctgccgctgcgcctaaggatctgaagcaaagcaccgatggattgtgcggatttggagcgaaggccaagtgcccatcgggacagtgctgcagttcttccggctactggtatgcataacatcatttaattctgatcagtatctagactaaccccttacagcggtactggcgatgatttctgtcaggctgggtgtctctcagactacggtacctgcaagggcatctccatcaccgactcatggcgcaaagcccagaaggacggcaagaccgacgagaagggtggtggtcagtactactttgacagcgataataatctcttctggacctgggatacacccgagttgattgcccgcaagttcaaggaaattgtcgcggagaagaagcttggtggtgtcatggcttggagcttgggcgaggatacctacaagttcgagcacttggaggctatgcagaagggtctcaagtctcactctcccaaagtcgcggagcccccccaatgaccgacagagactgtgcctagtagctagatgcagttatcattgatggtgagtcggagttggagctcagcttgtgaaatataccaaactgcttttactgtctattcgattcccctttttgcttcatttcatctctacatctcttctattgcccatgtctacactatcaatgtcctcatagtcatcttaatatctttcttcggttgaatgccggggtaaaattcaaatcaccatcatattccctattcgctattcattcggtagtccaccgacccatccatgactcaatgtacctctgcaccaagccaccagcaacgggatcctcaacacaagcaagatatgggcagtcctgaaccgtccgctcggtttcgaaagtaagaccagcgtcttcaataccgcttggtcctgtctctgacaggccatgacttgcatacttagccgtccagaaatcgatgagcttcatactcggatttttctccgggtcctggtcactactcgccaatctcctcagccactcctgcggagatacaacctcaaactccggcaagatagatccatccctcagagcaggaagcaaatcctccttccagctaaatgtccgcggattaaccaaatggtacaccatattggcttcggaagattcagcgacattcatggcgatatccgaaatagcccgagcacactgatcaacaggcagccagctcagccgctcattcagctctggcaatgcaccagtcgtcaatgcacttcggaacataagcgaaacagcttccgtttcattccattgcgcgctaaacgtatcgccaccaagctgaccgattctcagaacgcgagcttgcatgcccgtctgccgcatagcgttacgggtgatgtgttctgtaaccagcttcgacctgccatatcccattttctgtgcgtgctccaagttctccagtatcgtctccggaatcgatgccggtttgggtgtgttgcttgcagcgcttacactggagcagaagaagaagcgcgcaggggacggtaggagggagcgtaggcagagattgatgaggttgtgtgttccgcgtatatgctgttgctcgaaggaccgtacgcctaggttgaagttcaccgcccaggcactgtggatgacgcatgtcaaggatgacagtaagtgttgcaaatcgtggtctttcagaccgaggttcgactgtgacaagtcaccggggacggcgtgaagctttgcggcttcggcatcagtgagagtgatgttgcggtcagctagtgatttgtagagacgagctcctgccgctgcttgtcctggtgcgcgcacgattgcccagacttcggagactgttggtcgccttagtaattccgagacgatgaaggctcccaggttgccggttgcgccggtgaccaccacaacctctgtttctgggctttgggtgatggttgggaagtgttgagtaaagtgggagtacttttcgatcatttcgcgcatggaatcaagctcatcttccttctcggattcttcaccagttcgcagctgatagaggtgctttgcaagcgccttgacagtgcctttttcgaacacaatgttctgggaaagctgatctcctcgctcggcgatatcaatatcgcgcatgatgaacctccagatttgtgtggtctgcaagctgtccactcctgccgagaagatgtcggcttcggaatcgggtattggcacgcccaagtcttccctgaatcttgaaagcagccaatcctccagttctgagacattgagagagagggaacctcctttctggccactcccctcgaacttggcatatacctgcttgatatcctcctcaaattgctgataaacctgacctcgtatacaggttcctttatcagttctggggtatacaacatcagcacccttaattatgaccaactcctttgggatacgggagaatgtctcggcgcgagaatttgctacttcaaccgctggccagatagcttccaaaaattcctcgtcgctcaagtgaggcaccttgccaggagcacggaaaattaatgcaccaggcaccgtccgctggaagccgaacacaacgcaatcactcacgataggctcttctctaacgcgaccctcgataggaataggaagcaccttttcaccgttgaccagcgtgattcgatcatccagccgactcaaatacttgtaataattgctcttcgctggatccgggtgtctggtgaacaaatcggctgttctgaaagagttttctgggttcttcgcgctatacggtggctttgaatttgacgggcccttgctcggcaggccgtccaatgcgacacattcaaaaaccccaggcgagatctcatccattagagtgaggtcggcaatgggacgatgcagtcgtgtatactgccactctttatcttccggagctcggaaagaagtcatgatttgtcctgtctccgttgctccatagttggcaactagattcacgccctgtgccacaagacggtcaccaaggtcgtctgggcagctggagccaccatatagcacaagctgcggtctggctagtgcttggataccttcttgcttctctgccagtagtttgatgacatatggcacggcactgatttgctgtggatgggccatctggagcgcatcgaaaagattttggtatgtgactggaagagaatggtttcccaggtacgctgtcgctcttgtaaagaatgcccgtccaaactccatcagagcatgggagtggaagagtgggctgatagtgaagaggcgtaggccgaagctcttgcggaaattggctagagtttgaaggttggtaaggaaaatcggcttcgggaaaccggtactcccagaggaatgtaggatccaagcgatcttcttgccttctcgtgatggatccgcaccctggcgttcaaatagaggcgtgctaacaggtcgattgaaccagtcctctctttgtagtagagagaagctaccgcaaccaggacgctcggtacaaatttcagttacaacttgctgaaattgcctcgtgttgataatctggttgcaatttgccatctccattagccgggcataagccggggctgtaagacgtgtagacaagaaaagcacagcatagccaagacgattcagcgcgaagaaagtcaccacgacctcgaagctagatccagctagcatagcaataacaggcgcctgctcgagcctcgggtcctaggggataattagtctagtttgacacaagaaactggctttcttcttaccgcgggtaggagaccttgcttcatgtaaaagcgaacagcgatatcagtataccgattgatgtcaccggctgtatgctcttcgaaatcagccgcttcacgaaccggatagcatatcaaaggcctttgtgcttcatcttgctgagcggcatgggattttaatagaccatcgatggtggcgaactgttcaaacgccggccactgggaatgaagcgtcccgtttaacaggcgagtcgcgatatcttttgtctggagtggctccacgcccccttgggtagtcgtgatggttactgtagtcatgattgttgtgtaaaataccattaacagtccattgactcgagatcgctttatacctggcggaaaagcctcacgttggggtaatcccacgcatcgcgggtgcttttccgggtttccgcgtggatgccccggaaaacacttaaccccagatttggatccccgcactatttccaggtttcaatcgaggattctcatgtaaatgttggtgaaattggccatattgtaatgataggtgcagataacttcgccgtatgagatgagacgaggtgttgattacgttgatggctcggatatccgagatggcaatgcatatcaggccaaaataagacatcaaattcaggcatcgaattcaggcatgaatattgtgatgacataatcacaggctactaactagcctgaggccacacgccaagagttcacatattacctccctacaacttgcaagcgagaagattcacagatatattaaacaaggaaaccaaaaaaacgaacgcataagagataaaaagtagtcaacatgttgtaaggatctttttttggctggcgcaaacaggatagttcttccaaagctgcctgaagccctatattgactactcaaggctaggaaaagacagagacatcacatttgccatcactccacttcacagcctgttccttggtaggatacacatggacaaatgccaagtacggtgatttatccgagcctttctgatcactgcacgcctgctggaagcgggcggtcaaatcctcctcctttgatgctggagttgtcaaaaagcaagcgcgttcgcaaagttttcctttcatcttgtcgcaaacagcctttcgcttttcggcgaccgtgtctggtaagtcaacaccagtacaacgggcttcaacataacgagtcgaatcaagagtgctaggatcgcaaaccatccgcacaccacctgcctccatcacgacgctccatttgcctcccagacaattatcatcgcaacctttgttggtgcggcagtcttgaccaggggtgtattttgcagtagctgacgcagcaaagagcgtggtgatggcgagaaacagcttcatgatgccttttggttgcacgaaggtagggcctgtaatttagttagtgaaatgcatggacgcagtcaacgaggcttcagaagcttactatggggcggaggatggataaattatgatgcaagtcaggaaatggggtagaggattcgttgtatgggggaaaaagaagctatgagaggagggagcgagacctccttatttatgataagaaagagcgttccatgttgaagaaagcgagtgagttgctttttcctatacctagtttgttcaatgcctcgcatttctcatccagctgaaatgtgggactaatcctagttaggtacctgaataatgcagggcaaaagcttgagtatcatgccggtaactgtaagggagaggtccggccaaatcgtgaatactctacaataggaagacaggtcccacgacgtcggctacctgcctcctatgtattgtcgatcattgtcgatcgtatatctcaatctacagaacatggaattctggcaggaatacttgcagatcattcaaccttgcatgatcagcgggaaactactcaaaaaccatcaatagtcgaaccttaagagcataattggaaagctaatatgtataggctacaggagattcgagtgaattagtccggcgacaaccatctggtctctctccttgaagacaagctccagtcttctgttacaaaacatctacctcttcaagtcaatcaacatgaaatccacttttcttgtttctcttatacctttcatacagggtgttctgggctctgtagaagtcctaggtggctcacctgttacgattgatgaccttccctacctggccagcatttcgaaatcaggcgtctatacctgtgctagtgttattatcagcaacgaccgtgtcgttacttccgtgcagtgcgtttatggcctagagtcacaacccacgagcctttccgtgagaacaggctcaagcaaaacgtcttctgggggatctgcatggacagtatcaaagatgatcggaatgctcggtttaacactgacaccaatgattttgactttgccgtgctcgaactattttctcctctcgtacccggcccgactgtcaagccgattgaatttattcagtctggtcaggagccagaggatgggactgaatgcgtagcttccggctggggtgactcgggagaacaattacaatcggttacactccctatcgtgaaccgagaagaatgtaatcagacttatgccggccaaatcaccgaccttatgatctgtgctggctcagaagctgggaaaggtacctgtccaggggaccgtggtggcccggttacttaggtggtaaatttgctggaatcatctctcaaactaatagatgccaactacttggtcgtctagacgttttcaccgatgttgccaactcttctattcaatcttggatacaggatcagtaatgacaactcgcagcaggtatttgcccactgaggttctgcgccaaaagacagaacatggtagatgaatactgtagagtttcaaggaccgtcacaatttcaatgttgaatttagcgaacagcgtttataaaagcccaaactaggagcaccaaagtgagcattgacttgattgagcatctatttattgaagtcagggaatgtaactcccgcaagttctcaatataattgcttcgcttcgctccgcaataataaatattgtacgaaaagtatcaatgtataaaaaatgtggcaaaacagaacacttgcttaccaatcgagctcctttgttatgtagttacatggttcaagtctattagtaaaagattcactgtacacatctaaattctaatatacatcttgtcactttaaacacggcacaagcgaccattctgatcgggaaggccatcaaggctcttgacaacccaatcctcactgccaacagcagtaggcgcatagaacaagccagtcgggtcataccgctgcttaatcttatacaagcggccgtagttggtaccatagaaagcctgctcgaacttcggttcgttgatatccgactcggacatgtatgcgccagagtcagggcaaacagcgcgccacttgccaacggcatcggtgaggccctccatcttgactttgatatcggcatcggaggcggtatctgtccaggacgtcgacgtgatggcgtgcatcaccgcctggcggaaggctgggtttgcagaattgggggtgaagccctcttgcagctcggctttcaggttgaatgcgagcaatgcgaagccgtcagtaagagtggagcgcagggcagcgaaggtagcgttgaatgaggtgggggtggcccaattggcccgtgggaagaggcgagagccggtcatcatagttggtgaggcgactgattcgagagggaatccggccatccaggcgtcgtagtagttgtcgtagtaggtcgtgtttggctggattgcgatgcctagctcttggaggtcatcgtaccatggcttgactagggtgttgaactggtccacggtgtggttgacggcgaagaaggggttcattatgaaggtgaaggcgtcagtgcctgtgggcagcacccaaaagtaggcgtaggtgccggcgtcggcgtgggtggggaagcgctccaagtatgatcggacgccagcaaagaaggtgtccacagagatattctcgccagttgagaagctaaatgtcgaaagagtcacaccgaccttaggatagacacgagagataatagaagtgacgactccataggttcctgatgggaatatgttagatgaaattcgagaagagaaagcgagagaaagtacacataccaccgccaccgccacgcagagcccagaatagatcgggattactttctttggtcactgtgacgaagcgtccgttggccagcacgacctcaagggccaagacttgatcagcagccaggccgtacacgctagacatgggcgaatgaccgccgccgagaacgtagccaccggcaacaccgacagtctaataaagtcagttatctcaccaaacgatgatcctttcggactgaccaactcaccttgccttcgccaccaacagcggtgaatccgagttccttactcttctcatagacttcaaatgcctgcacacctgaccccagcttgacaacgggaccctggtagccggagccgctatagttttcaatgtagtcaatgtccttaaggtggtgagtccagatacccaaagcaccagcaccggttgattttccattgaagtcatgcccggtgttcttaaccactagacggatgtccgcgttgcgtgcaaagttgacagcaagctggatttgagctacagtgctcacattcacagcatagctgctgtagccaccgacagtgcaagatgcagaggcattggtagtgggaaggcaggttcttccctcaaacagaggccacattgccgaggctgggtcagcagcactaatcgtagaatcagtataggtccatgtttgatagttacaggagtagggtgtgactaactgaagattagagtcgttccaatccgaggtaactctctcgcattcggcgctgtcatattcgggccatgaagaatagcaagacgccgctagggggaccgtcttgatcagcgcgccaccgaggaggttgtccaaggtcgaccatgcagactgcgacggccaatagcggtcaccggggaaaaccttgcattgccctgaagacagcgtggtcttatcagtgccattgctatcgccaaatttaaccagggctgactgctgtcggttgagcttcgcaatttcgcgatctgtcaattgaaccttctcactgtcaaacagcggtgcaccagccgaagcctgaccagcgcgggcatgtccgggggtgactagtaggagagcaccgagcaaaacgctcgttatagtcgaacaaggagacatggtgagcgtgtgaatgggaagaagctacaccggggatcggcatgattgggaaaaagtggccaatggagaccttttaaatcaattctccggcgctcgccagcataaaatgtgcatggtacgatatactagttagcgcaacgtggatagtactttcgtcgctatgaggttggcatccaagaggaaaaggcgcttgtttacttcgcccccacagcaatttagaatgtctcgctcaagccctctcccactccacctctcgtgtatctcttccaacgagaatcgaaatttgcatgaagctagagctagagatggtcttttctccgggcctccccgttcggcaaaataaataaagccacactctacctgtgacgcgcggaacgagtccttgccgtgttgttgagaatacaagtccaaccgagactgtcgccattagcttatttccattcagtgcggagtactccggatagcgtaagcaaccgtgcctattcccactctactccgtaccggtcgggatgatcagggtttcgatcttgtctggttctcttgttctctcgttctctccacggccgagagagtgttgcaaggaacaacgcaagccaagaactactccgtacaagatacgtgaacaaccgctactccgtgtacgaacggagtttttcttttcggcttgaccctacggagtaaacatggtctggccgggctccattctccatcccccgtccgcgatggtccactatgctccacctaagtacggagtactagatccgatctgctttctgggcaatgagaaccttgagtgcaagggactagtaggatgttgcatttcatctaattttgccaagggtcagaactaaaaaaactaatgaaaacttgttaaatgacgcagaaccgggaatttcgtcgtgggggccaaatatatacggagtgttgtgtccgagatatcgagctagaccgatgcactcatacacactatcgctgacgtttgatccttgatgatccaccattgagcacattcctgtactcactgaaataggcacttgtccaaattcaataacaccggcataagtgtataattgggggagttctcactcccgcccttttcgtcctccttatacaacataaggatgagctgcggatgtaacgctgcaagaaacgattaagctttgactagttagcttgcgagaggtgactgctctcggtatgcaagtagtatcctgtacctgcactagatgaggaatcgcatattacttcctgttacggacaattcttcagagcctagggtttcaatcccacttgaacacaatgaaacaatgcactactcaagcagcgaggacctgctcttctggtttctgtctaggagtcaaactaagaaggactcctccaatctaaaggacgcgtgcatccctgcacgccatgcattattggctctccccttgattaccggcatcataggtcaacggaaatagagccaattgggacacgaaggccgcgacttaaattagatcaatcaataaagtgtttatctaggtagaaacccttggaatggcccccgaacttcaaaagctaaagccaaataagtggatcatcgttgccgatcctaagtcgctgtgttggccgcagtaccagccttgcatcttaagatcgaaggtgcaggctgttcgagaactattacgttcttccgggtgtttatacaatggttgacgaccatcaacataaaacagccctagggattgtcgtcgcattcacggccctcggtggcattgctgttctacttcggctctggagccgatggctatcacgatcggcactcaccagtggtatggaacgaacgctcagatcggcactggaattgaaccattagaagtggttgctaacgagactcccgacagatgactgcttcattgttgtgggatatgtaagatcgtcaaattccagatccttgaagagtgtatgctaaatgggtattctctagatcatctccatctgccagtctattacctcgtggtactgtaagtgatgtgattcatctaagaaacagaagtgagcaactgctaattaaatcagacatcaaaaccaattatgtcggctttcatatttgggatatccccaaagacttcaatcccagacctgggatgaatgtaagtctactacccagcgcccgtaatagccagaggctcacggacaaaacagtggaacttcgcaaatcagattctctacaatccagccttgaccgtggtaaagctgtcaatcttgttgttcctgcgccgactcgattcgcgctcacgggtggtcaaatacctcacctggagctcgttcgccgtggtaatcactctttttatgaccgttctcctcgtcgacatttttcaatgcaatccagtagcatacgtctacgacaggacgatccccggcggaaaatgcatcaaccaaggcgcattctacgtctcaaccgcagcgctaaacctcttcaccgatataatggtcctctcaatcccggtcataatcactgcgcgccttcaaatgcccctccgacgcaagattgccgtgtgtatcatcctatgcctaggcggagtgtaagtaaacccccgaaatccaaccccaaccacccatcatacaccgcacacagcaatctgacacatccaaccaacagagcaaccgccgtcggagtctggcgaatcgtaatgctcgcccaagcatttctctccaacaccccaaacccagacccaacttacgcaatcggcttctgcagctccgcagtcgaaataaacgtcgcagtggtatcagcctgcggtccgtccctgaaagccatcagcagcaggatattccccaaactgctcggcagctcgcgagggaaatccacctactacggcgccggcaccggctccggcaccggcgtgggctcacgcagactccgctcgaatgcgttcaagtctacctcacacgcccagcaatcagtgtactccacccgcggcgcagattacgagatggccgatccgctgggcgggccgcgtgttgatgttgttggggattttgaaatgcgcaagtataagcgtgggggtagtgatagtggtctgagtagtgaggatggtaagggcattatgaagacgactgatatctcggtcggatatagtatggagccccgggtggaggatggtcggtcgcacgatggtaggccggccagtgtagatagtatagtttaatcaccttatatacaacatagatacgatttacgaattcaaatggccaatagcctacttgaagaagaaggatatcaaaatggaccgaggatctactccaatttcggatatgaggggttactctgcgtacataaggtatggggtttcccctcttataacatcacttacctggtcaattcagtaaatttgacttgttttcatattcaactcattcttgattcatcgatatggcgactcagtaccagctaccattcaaggtatggcttttatccctccgcggggttcggcgagatgtccgaagtgttgagctaacacgactttttccagctcgcggatcctagtctgctgaaattcgactccattgtcggcgacaaatgggtcggtgcaaagagcggaaagcggtttgaagtactcggtaggtgaaagtgcattatcctccaagagctcacaactaacatctcccacgcagaccccggcaccgacaaagcgtgggccagctgccccgccaacgcagcagaagatgtatccgccgccgtggaaaattcccacgcagccttcgagcaattccgcaaagtcaacccacgccaacgcgccaagtggctactaggatggtacaacctaactgtcgcggcccgcgacgacctcgcccagatcgtaacctacgaaaccggaaagccgctggcagaagcatacggcgagattgactactccctgggcttcctatggtggttcgccggagaagcagagcgcatccagggcagcgtatcaacagccgccgcaccaaaccgtcgtctgttcaccatcaagcagccgattggcgtagcagccgctctcgtcccgtggaacttccccgttgccatggttctacggaaagtcggtgccgcactagcggctggctgcacgatggtcgtcaaacccagtcccgagacgccgatttcggcgctcgtgctggcagagctggcgcatcgcgctggaatccctgctggtgtgctgaatgtgctcactacggacttggagaataccccggctctgagtgaggcattatgtaagcacccgcttgtcaagaaggtgacgttcacaggctcgacacggataggtaagttggtggctgcgcactgtgcgcatggtcttaagaaagtgactctcgagctcggcgggaattgtccattccttgttttcgacgatgcgaatctcgatcaggccgttgagcagctgatgtcgctgaaatggcgccatgccggccaggcttgtatcactgccaatcgaatctatgtgcaggctggggtttatgatcgcttcgccgctcttctgaaggagcgcactgctgcgatagttgttggtcatggtgccgcggctaacaccacgatgggaccgttgacgacacctcgcagtcttgataaggcctctgcgcaagttgaagatgctcgtcgcctcggtgctgatgttattttgggtggtaattctctgacctcgaagccgggttatttcttcgagcctacaatcttgtcaggaatgaccgcggacatggccatctcgcatgaggaatcgtttgcgccgattgctgcgctgtatcgattcgatactgaggatcaggctgtcaagctggctaatgataccagtatgggtctggccagttatgctttcaccaagaatatcgatcgcatgtggcgactcttggaaaacttggaggcgggaatgatcggaatgaatacaggtgggcttcctatgatcaagtccaataattctaatcaatctaacgaattcgcacaggcaactcatcggctgccgagtcgcctttcggtggtcttaaggagtctggttatggcaaagagagtggaaaagacgtggctgtcaatgagtacttggtcaccaagacaggtaccttgacaattgagggacaatattgagtacacaacatagtacatatgcattctttatagatcatctcgatcatcttgaactgaaatgaaattcatgtattttcttggttgtgattggtcagctgaatccacttcaagcactgattggctacaatccggggagatcttttcaatatcagattttcttcactacaccaactattcttctcatcatggaccaccttagtccgctacgacgcctgattcagtctcacccgcttattgacagtcattcccacaacctactgaaccgcgaatcagccgccgactatgaaaattacccgttggaagccatcgcctcctcagcagacggtcgggccttagaaaatgcacgcaccgccctcccctcgctgcgggccataacccagctctccgagctgtacgacctcccatgcacaaactggaaagacatacaagctgcccatgatctctacgtcagcgaagactacgggaacttaatccggaaatctctatcaggcacacacgcactgctactcgatgatgttctcagctacgacgaagacatcgcatcatctagctggcacgataaattcaccatctccgggacaaaacggatcgtacatatcgaagccatggctgaggccacaatcctgcaggtatcgaactcgcgcaagaacggcgaatcagtttggaacagtttccgacagcgattccaggacgctctcggcgaggccctggacgatgccaacatcgttgggtttaaatcggaaatctgctgtcggaccggattggacgtggatgcgtattcctctgatgataccactctgggcgggtcattgattcgcatcctcgattccggcacaacaaggtctggcttcgcagtcgatgataaacatatatgtgactggatagtccagcagacgctaaaagcgatctgctttaaaaagagagccggtgttgtgaaacctttgctgttccataccggcttgggagataatcggattaatcttttgcgagctaaccctgcatgtctgcagcctttgatcgcgcagtacgctgacgcggacatcgtgttgttacatgctggatatccttacacacgcgaggcgggttatctggcatcagcttatcccaatgtctatcttgaccttgggaaggtctttcccttggttagccgagaggcgcaggtgaaagtcctgagagagagtctggaacttgcgcccaccaaccgtctgctctggggtaccagtggccggtttcacccggagacgttctggttggctaatcgacagttccgccaggctcttgagacggttagttcctggactgcctcctattaattacctttccctatgctaattttcttctgttttgcaggttctcgtggagtatgttgaatctggcgacttcactgcgtcccatgccatgaagatagcagcagatgttctgttctataactccaatcggctttacggcctcgacttgactccatcatacacacctggagagtaaactgctgactatgcgaggatgtagagcccgaaggtatgtccatgtctttcatttctattccccagatgcatcctgacaattatctcgtcagttgatgcttctactctcacgctctcctaatgtacttgatattgcaaccccgctgtcaaaattgattatcaatctttgagattctcagaatctctcgaaggcgatacggacctggaagcactgctagcgtcggagcataggaataactacgtttcgtgaggtaactgaacctcgcatccaccccgaataaggctatactgctccgtattaagacgaaattttgaaccagttcatacgatgacgtcattgtagttgtaatgtttaccttagcaatttgcaacacacccaacgtcaaagtgtgtaaagataaccgtctcgtcaacaacccaagagatagcggcggctgccgctttcggccgttgagatttatattacgcgaagacattaccgtgatgctggtgatcgtgctgaagagttgttagccatttaaaaaagcctgaaccagatcgacatagtggatcatttaggacacgcccgagctcacattgcctttgtacgtttgtcccaattacacatgataagttgcgaagatggtcaaatttccttgcatggaaaaaattctacaatctaccagaagggggcgttttcacgtgttgcatcccatcccatattacgcggtttctatacattagacgttctcggaaacgcaaatggaagcttgggaagttataggaatcgtttcatctgacattaaaatccgaagctatgcgttatgaggcacttgctggcagtatgagaagatattcataaccctctgggagcttgcccaatggccaatcccacttcttctcgaccaccgccagcgccttcaatggctctttgtggtccacgaagaacttggtattcacgcccgaaacaatcccagtcgtatccttgccgtcgaatatgattccacacagctcagcatctcgaatgtaaggcaccggggaggtcgacatggtttcattggcgttcttagcaatgaaatcaaggtctaccttttcgatagttcctactcaggataagtatcacgcctccagagctttttgtgtgggacttactatcaaaagctttgacggcagctagacaggcagctggatgtgagctcatcacgccgtatatagtatcatggtctgtcctgagtattcgcaaaagactagtcgcaaatcctttgccacggtggtgccgatcgaccactaattgagtgatccagcaaacagtcccacccttgcaagtccagcggcagccgaatgcatgtccgacaagttttccttcgataatcaccctgctgtatgtagaaactcccaccactttcgtcggagcttgtgggtaggtattgttcgcgtagtcttcgcacatttaacttaaccggctttcctactaaaagttagatgttttggaaagaaagcttttgacttactcaccgggattacttgaaaactcgccccaatgtgccatagttttccttgaagagctgagtggccttgatcagtatgtcgtccgtaacgttctccgcagggatcgtctcgtagatttgtgacgccatgctgaagtgtctttgaacattagtactttcaatgagttcaaagtgagttgactccgcgggaataggatgagttatgacgatggtttatgcaagtccccgttggcgtacatgtgagggggagggctcgtttatgtaccacaaaaatatgaatctttccatgcaaaagttaccagtatgtatattgaattctcgtttctcatattagaacggaatgtgatcgtgatttttttttccatgccgtccttccctcgtcccaaatcgtatacatatcgcaaggtcagcagaacaatccagcgccacctgaagtaacagacatctatgtgcgaataaatttcaatcatcggatcaaatccaaatataagacacgcgtataccatcgcgagggtatatcgttgcacgtcgtccgattttgagcgtcgtggaagaagcgaaagcaaaaataaaaggtataccaaccccagccgtcgcttcccgtgtatccagcgttggtctggtacaatgcagtgttaatcaataaatagctcaaacaatagcagttgttggaatgtgtgtgtgtgtgggatatggtggggggagagagagagacagaggaggagaaatcaaaatgtccattgtctgatatgatagtattgataatgttataacaacacaatcaacaccgatcacttcttcaggtcaacgacagattgatatcatagggctatgatgagtacaaaaaagaaagaaaagaaaaaaaagccaaaaacagtggtacatttcgtgtgcggtttggtagggtgtgagagtgagagaatgtgagagtgagaggatgagaggaagaagaaagaagtagggaggtagatgtatgctcgagacaagagatcctaagagccaaggccatcggacacatcatcgcaagcaaaaacaaaggggtaaaggatggaaaccagcaaacaaaacgaggatttcaaaaaaaaagctcgcacgccgaaccaaaatggacaaaacaatgctagttcaacatgccatcttccgttctgttaccatttcatccctttcccactcatctagtagtcgtgctacttctctgaaagataccggttttgtaaggaatagatccacaccagaagccatagcatccgactcatcgcgagagctgctgagtccggtcaaggcaatgatgatagccggcttgcggccatctatatccctctcgagagagcgaatagcacgagtagcctcgaacccattcatgacaggcatcgacatgtccatgaagatgatatcataaccactctgcatgcgctccactgcctcaacggccaccttgccattatcggctgggtccagctcggtcagctggcgctttttgaggaacgtcatcatcaggttgaggtttatgcgattatcgtcaaccacaagcacccgggctagtcgtcgagggcggatttcaccctctatcagtggtgctggtagaggggattctccaatctcctcgggcaatgtgctgattcttgagggatgttgcagtggtgatatcgtcatggggcggactccgggacagtctgccagttcgggggcgctatgggcatcggcaggggatatgagaggcgaatcgagtgcggatggtaacgaggacgtcctaatcggtagactcattggtttcagagcggaagacggcgtcgcagatgtcgattggccgtgggtcaaacacctcatgatgcttcgggctaatttgtgtggcccacagggacgccggatgatattcacggaggaagcaagaggcatccactcggattttgcaccagtataatccattgacttgtggcataggacgagaagagcaggcaaggtggctgtgggtgcaatggtgcggaagtttggtaaatcgttttcatccataagcacaagatcaacatcggcttccggtgtccatgcgacgatctgtatagcataccagtctaaaaggtatcgagcaatttcagaccagtgagagtcggcagtcacgtcggttgggtcgatgccccagatggaggctcgtctaccagggtatgcttcgcgtagtagaagagtttgcgccaaggtttctctttgttggataagctgaccagatggttcgacgggcgggctttccttgccaacaggccgctctaggggtagagatacatgtacaacagtgccctccccaggacggctacgaattcgaatgcttccattcagagctttgaccaaactgcgaacaattgaaagtcccagtccagtaccgacagccaaggcgtcttcctgagcaaaaggcgtgtaaagcttgctgcgcaaaaattcttccgatatacctttgcccctgtcagttactgtcaacgtgaccaagtcttcgaggccttgccgccgagatcgtccttcagattgactagatgctgacaaggataaagtgacacggccagagtctgtgtatttcatggcatttccaaaaacattcataatgatgcgtcgcaaagcccccggctgtgtccggtagacccaatcccggaatgagacatcgattacaacttcgacgttggaccggtgattctgcgactttgtttgatgtggcatcaatacgggcaggtccgccgaggcagtagagctctggccgtacacatggccaaggcagatgccttcaacgacttcctcggcaagaatggccacatcggtagccacgagcgtatccagatgatgcggcaacttgtcggatcctttgaaatcgagcggcgactctttcttgcgtctcattgtccgccaggtcctttccaaagataccactttgctgaagtcaagtacctggttcattgtatccagtaatgtccggccacaggaattgacagtttcaagcaatgagttctggaattcattgagatgggtgctgttcaaaaattcggcagcggccaagattccatgtaggggactacggagttcatgcctggtgaaggatagtaattagtaactgcggtcggacatgtcgattatctcctagagactaagaaaacttacgaaatactcccaatgaaatcacctttctggcgatctgcgatgagggattcaatgcggctatattcagccatgatagacgatgaaaacccaagcactgaactgagctcaactgagttggtgaacacctgggtctcaattgtgctccagcagaaacaccctccgaaccactgcgaagaaacagcattccacaaaggcacgaatataatttgcgcggcatgtgggaaatactgattgagtaccgagttttccgcagctttccgtcgctttcgcgtggcctttgagagctgtgtagcactaggtggggaccggctggtggtactggtgccacgaagggccttgtcttcggattcttggtcgtcatcatctgaggtcgagaggagcccatcgcggtgaaaggaccacagctttcctttgggatagcgtcgaagcaacaattgcaggaaagatcggtctaagttggcggcagggcatgtggccattgaccctgcttggggagcaaacggttcttcgtttgttgatgctgacagtacagaggcaggtccgcctgtgtcggaacaatcactacccatttcggtatccatcaaagggctattgttggcttctagaaaaatgaccccaccgtcgctacccaggtcaagactctcgcgaagtaagttggctgctctgcggaaacaccaagagttgccttgtgaatcatctggtggtagtttatttcggctgctgcttgtcagccattctggcagagagctctctactgtacccgactctacttttgaaccgttgtccaatttcgaactgttacccaatttcgaatcggacgagacagagctgaaggaacgcgcgtcggtgctgagtgatcgatcgttcggtggactattggagggcgcttgcgatgcgttttctgaggcatttccacgagagccaccagagccactcattcgattgtaagaagatgccggagttgctgacgaagggccgatactgttggtacgcgacgggtcgatattatccacgaaactagagcttccttcaacgaaatagctgagcccgcgggaaaggcgggcggcccggcgtccttcagaagcctgtctgcaaatcttcaaatagtccatcacaaccatcgataaagatcccagtgtatccttctccagcggtgtcaatccatctcggggttttgtgtccagcacgaaaaaacaacccaaattgatattcttctcggttgtcaagggagttccggcgaaaaagcggaagttggggccgttttcgacgaaggaaaggtgtttgtagcgctcgttttcggccatatcattcacgactagaaattgatagtttgcattctcgcggtcattggggggtaatgaaacagtgtcctgtcgaatggcgtcaaaatcgggaagttataggaattaacaatgcggtagagctcgacaatggctccggggcagccagctcgtagaatgagcaaaacttaccttgcacaaactccatgtcttgcgggtgtcgggtgcccccaaccagacattgtcattgtcgtcgtgaattgtcggatcgttcaaattgagagattttgttgcttcggcaatgatgtgttgcttatcacgatccaatacagttataaacacccgctccacgttcaggcgcaatgccgctagctgcgcaaacgatgtcatggtactattcgaggtacctagaatgagagcttctgtgccaactgcggtcgctggtcggaaagttgcactgctgtgtgaaggtattgagccttcggagatcggtggagtgattgtacttcctgaaagtgaagaaaaagggaatccatcattcaccggaagccaagatggaaccacctcagcttgggaactaggctggtagtaacggtatagctccctcgccctgcgatctgcattgtgtaggccaccatggcgtgctttaggaacagtcatagtttgccgctagcgttagaagactgaggatacagtgctgcatcctcggactccaagtcgagattggatcacgccggtgacaatcgaggcagggtggtgagggtcgagagaagtcgaattgtacaaaggaagtgactaaacaggtaggaaattgttggagggatgagtgtaactatattagtaagagattatctgagaattgggaggaaagtgggatttcttgatttagatacggctccccacaatagaacagtaagtcaggtgaagcgcagataggccagggaagactgggtgaaaaattcggcatgcacagccagggacccatcaatcaaggtacaataaggacgggcattggcaaagtccagtgatcggataaatgtacagaacatgattagtgggaacgagcgatcggtacacattgggagttattgtatggggtacacctgctccaccgtttcgtcgcctctctcttgggactcgtcttggaattgaccggcaacttgagatcgtcgcaccaagatggcgcaactgtcgctggatcagcatattgactggagcacgatggagtagaccggccattgggcagtacggatgtggacaagatgtggacaggagtaggtttcaatggctgtggcgtggtcctgtggcgtgttgaggctgcatatcattggctgacggcctcagatcacatgatttgccagggtattccgatccaagccaagtgggccaatgaatcttcacgatcgttctagtagaagtcgctagttgcaactggttactccttgcttcatgcttccatggcgtagcatgttatgtccacagtctcgatactgtcgaccaaggcttccacatacatgccaatgccatgatctgacacgggctgaaattagcgtcgcaagccctatgacgacagtggcaaattcttgaagcagatttattattcactatgtatctgaggaaagcgatcgtctcttccgtcatgggcctgaacacctaagatgatcaaaggctcacaatcttgtattcgacaacccctccaaacttaatccgcctatgaattatgaccggtcactgcaccccagatatacgccacccacgacccgattgtcaacaaaatcagagcactgaagcaaattatggagacggtccgggtgcgccggcgctgggttaccaagttgcgttctcgaatccgctcgatgatagccgcacccgatgtcaaccgtttgtgccgagtccactgtaacggcgccaagttatcagtcacaaacgagccaacaaggatagctgcaccgacaaccatagcaccggcagcaagaactaggtagacctgcaccactcggcggtatgaatcgtcatctgcgtcctgcaaagctcccgtgatgatccgaattatgatgctcatactattacgatttccaacgtcaatttgtgcctcgaaccactttttttgatgcagggatgttggatcaagcttacgcattattcatggtgaccttcaaagcatacgcggatccaaaaaccgattggtgccacagcgtggtgcgaatgctatcgatgaccgacgttggtccgaaggatacggcaatggcgtagatgccgaacgcggcccctgttcctgcctgcgatgttgcaaaattgatgagaaccatactcaatagcataccaagaccgcaggtaaacactaaattggtcagcgttggacttttatctgatccttgtgatcttggagatataactcacagacggacgcccggttgcctagaacatcaatgaacacgcccaagcagggaacgaggaagaagcctggttaatgtcagctatatccagctataatgagcacgcattccaccaatatcatacctgcgtactgcgaaagagaactataccacccggccttgatggaaccaacattgaatcgtttctcggccagctcggtagcattttggctgaagactgtcgcagcactcgtttgaaacacagagaaagacatgacagcccagaacatccatgggagctcgaacatctttttgaattcaaactttttgttcttctctgtcagttgctccttggtagctccatcgcgtcgtcccttgtaatggcgattacaatactggttgaagaaccagaacgctgcgctggccgcattcgtgaacagattcatgaacaccgaggtccaaaaaacccacgcgaagtttccagttttctataccttgtcagcattttcttaccaagttaatcggaaaagagcaatcacttttgcaatgatgttggccgttgacgtgccaataaacccgcctatcttgccaactgcgagctcaaatcctagagtggatgcaaatccattgctaggggggaaccaagacgagaacatcttatattgagcgatttgtgtggcgatatcgccgagtgcgagaatgactcggccaccgatcatgaagttgaaagagcgcacggtcgcggcggcagcgacgaggatggaaccgatggtatagacgatatttccataaacgatcatctctattcgaaaggacttgtcaggatattcttcgctgatttgacagactcgacaacataccagctccaccgactcggtcggtgaccacaccacttatcaaaagcaggaccgttgccatgaaattctcgctggcttccaaaagcgaaaattgaacattgtctatgttcatttgctgccagacaaaacccgtcagtgaatcgtgcaaatggacgtttccatagcattctgtacctttttgatcgtgctcttcatagcacccgttacgccagaactccaatgcgagccaaagctaatgcacgatatcagcgcgaccgcacacaactttgctgcaagcggcggtggcttctttccatcagagtcatcgcccggttcctccggtacgctgcggatgtcttcacggacaggcgccgacaccacgtcgaccgacttcgagtccgaagtatcgactcccattatcacaactcgatgctggaattatatagcaagcttctagcttgggttgtcaagggaaataaagtactttcacgcaaacttaaaaaaagacattcatgccattatgtactccgtactatttaaggatatctgagactggcaaatgttcaagacaaagcggagccctgccagtccgtgctacagcctacggtgagctgatattggtgcagatcagctcgaacgtacgtaaaagggcaaagaagaacgtcccctaggcgcttggcacatcagataagatggttgagatcggggccttgtcccgaaaagagcctagcgctgcgcatatactccagttcggagcaacgtcggtgaatttaacatttttttaagtctcttcaacggctttaggaaagccctgcgcatgcccgcagtgggaccctggggtgcaaggcttttctcggcttctccgggctgtcgtcagcttgcaaatgccgttatattttgctcaagtttagacccgcttggaatctttaaacgggttacgctgggcagattcagattattatttcgtgcgctctcaccagatctgtctgtcttcgtcgggtctcttgaactgtccgaggtacaatatacgagggtgatgcgagctggtctcgtcatcacctttgtcgactgctataatttgcgtaaagactgagatattggaaatttcaattgaacagcctccagatgtggcatatcaataggcttctaaaacaaccccggcagtgggcctctagtctagagatgtatgcagtcatagagaaaaagaaaagaatccaatacaaaattccacaaatattcaacgagaaaatcaaaaccgttccatgagccgcttgcgcacagtccacatgcgagctcgtttgccgtagatgtacataggaatggacatgagcatgaagaaaagctggataccaccaatagacaggaacacggtgcgtgaaccatcggaatcgagccaatccacgataaaaagggagaaaataaggccgtggagaacatctgcaagagaaaaaagtgttagaccagacagacctaacaaaaaatgaaggatagttcaacatactcttgctaaagttaagtgtcactagcgcctcgccggcatactggcgatagctatctacacaaaaagtgatagcggtcgtgctgcctagacagcaaccaaacgagatcaaaccaaagaagatagtcgggacaatccaagagtcaccgatctcagcactccacccaaaagccatcaggccgatgacagtagacaacgcgataggaattgtcatgacaagacggaattcaggctcgtagatgcccccattgcgcctggtcatgaaccgggcgataatgtcggatactttgcccgccactccagttccaaggagaccgccgataaacggcgatatgtagatcaggcctgtctgcaacggggtgaagttgtactgatctttgctctcgaatatgtgtgcaactgactccgaaagtacgatcagccacccgaccgatagtgagtataccactgttgaccacagcacggctggataggcgaataggatgaatggtcgcgcggcaactcggtaccagctgtcgtgagcgattcgtccattccagactctaagtaatcgggagtatggaatcttcggaccttcacgcaatcggtttgtgtattgtagggttgcaggcagcggtggcccggtaggctctagtgactcggtcctcgcaggtgatgcggcacctcgacctacggtgactggtcgagctgcctctaggtcagctgtctccagatcatctgggtgtgcgctaggcaaaagggcgtgaggtggtggttggaggaagtcatcgcctttctcattagccggggtcggcggttgaatgttgatttggtcaccattggtagcattaccggcctcgcaaacagaatcggacttttcagtctcgactgcctggcctccgccttctaggtggtcatccgcgaatccaaaatgcgcatgtttggacttcttcggtgccaatgctggatctgaatggtcctgttcggcggactcgtcctggggttggacatacgggtgccgccctcggaagccgtgggaaacgaggtcggagacactctgaccaaggccacgcgagcccttgtgtttgtgcacacgcgggcggggtgtacgatcccaaaatgtttcgggcacgaagaaaaagagcaagactaaacacatgcctgcaaccatggcgacaatccaaaatacccagcgccagcttaggctttcgatgatggcggcactcacgagagggatcaggttctttccgcctagtagcaagagcgtgtatatccccactcgataggctctttcgtgtaagaagtagatctctgcaattgtggcagatgggagacactcaactgggctcacggcaaatccttggaaaacacgagcaaccacgagacttgcatagttcggtgacgctgcgcaccaaattgccgagatcacaaacaggatggctcccaggaggtaaaccggtcgtttcccgtatagaatagccgtgggcgacatcacaacagaccccaggcccagccctaacatatacagcccggtggtgaaagcaaccttctgtgtactggtatcgtacgtggctgcaacctcgttgaacccagccgccaagataggggtcatgccgcctcccatcaggcaatagaagcccagcgagaccaacgcggtatctctttgccatacaggccagttcaaagggtcatttgcagagtcatctggttggggatcaagcacaaattgtccgtccgctgttttcttctgggttggaaccgtcgaccgcgttcgagaattagaccgcgagggcggataggacgaggctatagaagatgtcgatgtccggtgcggttgatgcctcattcccaagggttcattgcgatttgaggataagagaagtaccgttcctaaatcatgccagccagttgtcagacccgttccacaatatcatctctctgtgacaggactccctactcaccaggaacttcgtctgtctctcgatcacttaggattcccagtgttgatttggcgcgataagtctgattctcgctacgctcgaaatcttctttggtctttcctccaaagagtcgtctccagcgcgaagcagctggctgctgctggacggggtccaccgccgtgttctcctccattgtagaagaacggtcttctgtcggtgaggccatattctgttcgagaactaggaataaggattcgagatagtccctacaaaaatatgtgaagtatgtcgccgagtcttgcgaaagcgatcaacgcttctggatcaacgcaagaggcagtaaatgaacatcactcaaaggcatagtttgatggagtgagaaagacgaggggcgaggtagtagggaaagaaaaatctataagtggcggggggtgatatatagtgtcctagggccattcgggctccatgcgataagctaaaatggtggaaacacaaaaagaagacaagcgacgatcccaaagaggcagtggggggaggcggtgagagcgtctgaaggtactcgctgagtaccgtgactgtcgcccagccgccaaggttaaatcaagtcgccttgaggtactatcattttgatcttatcagagatcttcttgcatatctgcattctacacatccctgtccgtggacagaactgctggaattgtccgagaatgacggggcagataagcacaccattttcggacaaggctaagctccccacaatatgtcgttgataatgcacctcgtgggtcaacaatccgcgttgacaggtggatctttgggctacgcattgcacgagataacgtcgagaaaacaatacgctacactcacatatctgtcgacaatctactccatacagcgagggttaattgcactaggctcgaatattcccaatcgccgaatgcgcccggccattcctggtatatgccaagccactcaaatccggcgcttgtcgcgagagttttacttcgcgtgatctgcctatccataaacatatctttcgacgagttcaagtgtcactcactcaaatcatgttttcaataccccaaaattgtctcagctgaccgccgggagatgttggctgtcgtcattgtgcaggccaattgcgggggaaaggagccccagctttgatgaacttgtcataccgttggatgtcagtgtctctgttcgtcggtgctcgagctagcatggcgtcatgggtcagaccatgggcaaccttgtactacatcatgtttggaagaggaagatacaacacgccagttgcgtcaacggttattactacttctagggatgccacctgatgtgagtccacgaaggatcggctgggatcgacagattcgttttagggtgctttgattattgattgccatttgctatatgctgtgggtggattaagcaacttgctaatataagacaagactttctagttatcatttgatggcattgtccgcccctccatctgaagtaggaggaatctggcaaatccccgggaagtacatactccagtcccttgtcttctctgctgtggcattctcatcaagcttgggatttgctagtaataagggaaagagacggcgtatgaggttgtaccaacgtgatggcatggttctctctgacagaaacccttgttttccatccctaaaaatttctcttgtctaacctatttcaggcatttacacataggctttttcaccttaaggcctgcaacggctagtatagtcctttgacttgatactatgttgctgttctagggttcctatacaggtgtgtaggggaaaatggctaatattacgaccatagcatactacataaatacatagcagaccattaagagtacagttctccattcagaccatgcccatctacgttgatggccaactgcgtccaggggtgaatcaaatcccgccgatttccattacaggggccgtttgcgggcagtcacgtgtgaaaccccctttgacaattctagaccaggttcaacacaagtgctctttctttgctttgaattcttttgtcatttgcttatagttacttcatcttaatatttctacttctttcttactactccacattcatttcgatatccatctttgcccttgaaaaattgtccggtgtcgatcaaaccgtcccacgcgacttagtgtcgtgtcatcactcgaagaattctctcaccttggatatcggttcctccgctttattacggactataaattcaaagcgcaatctcaattcttattcgctcgttctgtgggagaaaccgccaacatcatgaagatcaaccagtcgcccttccttctcttccttcttcctgccatttcggccgtgctcgccgacacatacaatgacaacatagactctaaagtctcgcgggagactgtgggtaataatgctcgtctcgttgactcggatatagtcgcatccaatgtcgccaaaggggcgccggacgtccccgtggatggcaaggatggcagaccacacgctggtccgtgggtggaaaccaatgcagaccgggatcgcacaggtctccagggaggcgatgatgttgatccggtttctgtcaaatatgataccaatattccctcttcggaacacctgagcaccgaagaagggaaaatgatcccgcattcaaacggcggcgtgatggatgatccgcatcgggcgggcccgaaagaagggacacgaggaaccgagggtggtgtgtctgagaaaggaaaagaaagccaattggcatctgaaaaagtcccgggagggccgaaggaagcgcctccgttgccgcatagtgagaccaagaagttgggccccgacagcgacgacacaacaaccgggggtggaagtcggtctgcggagggtccgggaagccttggaatgctcggggtaagtctttctttatgttgcttgagtccgaggtccttcgttgagcaagtgggattaatgtccatctagaaacccgacgacctgcctgaaaagccacacgatattccacaccccaagtccccgggcacagcaaaggaggaccctataggccttggacacgacaaagtcaccccggggtcgtcttcgagttcttcctcgtcctcgtcctcgttgggccacggccacggccacgatcacgatcacgaccacgactctggtatccatgatgccggcagctcactacactcccttgtcttctcattcaccatgattctcgtctctgaaatcggcgacaagactttcctcgtggctgcgctgatggcgatgagacatcctcgcttggtggtgttcagtgccgcattcagtgccttggttatgatgactgttctttcagcagtcctgggccatgcagttcctactcttatccccaaaacgttcaccaaattcctggctgccattttgttcttaatctttggtgcgaaaatgctcaaggaaggccgtgaaatgtctccagatgaaggtgtgggtgaagagatgcgagaagttgaggcggagctcgaagagaaggagcacgagcagctgcgtatgaaccgccgtcgttcctcggttactcctcacaatctcgaagccggtcgcgctggaggccgtcccaaaacccgtggctccggaaaccgcctgccttcgcctccggagagcttgtcctcgtcctcgtcccgtggctcttctccccagccccgacaacggctaaacaatgtcgtttccggattaagcaatctattttccctacttctcagccccgcgtgggttcagacctttgtcatgaccttcctcggcgaatggggcgaccgcagtcagattgccactatcgccatggcagctggccaggactactggtgggtgacaattggagctagcgctggtcatggaatctgcaccgcagccgccgtactcggtggacgggccatcgctggccgggtcagcatgcgtgttggtatgtatcctctgcttgttttcctatatatgacacatgctaatcttgacattcatagtgactctgggcggcgctgtggcattccttctgtttggcgtcatctacttcatcgaagccatcttttgaagcgctgcatatccgcggttgtatgtgtccatggaaacttatcgttatagtttttggcggctgattttgtctaaaattcgaatgaatgtatcttgtgacatacctacgactgttttaatactataattacgtgtctggcccacgcaatatccaggttcacaatctcacatcaaaatggaaatccaagctctgagtactttgaccgtctgttgatgcatcaacgtgtcgttttctaccaatcacatagagacacggggcatgcgattacatgaggaaatgcacgagcctacacatgtggtcgagaaagtgttgtgatggccgatctcttcggtcttaggagtaattctcctacaaatgaacattcgtagttccaccacccgctatactttgaacgtgagtatccattctaaggcgttctaataaacctagatatgacgtaaattaggcgcccagtgtatgagactagagatcagcgaatataaaatacgaggtagatatcattcctaatttaacctttgaatcttcccgttcaaggtctagcgaactcttcaacatgtcatggtccaaagtgaacgaacaacgatgtgaacgtctacttggcgaaaatgaaacatttatcaagatcgttggtgatgccgctcgtccgttcaatcgtgaacactgggctatcaacatcattgtctcggtgaccccgctaggctcactcgccaaggaaaatcaatcctccgtcttccgcgaggcatggagggctctgcgtttcaggcaccccacgatcgccgcatatatcgtggacgaaaccaaatatgtctacgatatccccgaccttacggcacttgagaaatggacggcagaaaccttccaggtgattgaggacaagacggttgatgaagtcatcgcatctgccacgcgtgttccatatgctactatgaccttttttccccagacgggtgagctattgggccgctcgcaacactggagaacggatggcatcggtggcttgattctgatggacgacttccttgacctagccgcgcagtctgctgcagatacttcctccctgccatggggtgaagagaccgaccggttagcgtcgtgtgttgaggaggcatcgtccagtttcataacgtcggagaagcaagataggcaactaggccagcagtgtgttgcaagttttggtcatgccgctggggccatcggaatcgcctcgcgcgcaccagccgagacttccccaggtggtacgcgcattagccgtcttcatctcaccgagcaagagacaagggccgtagtgcaaggttgcaaggctcgggggctctcggtaacagcagcagtacacgcatcaattgccggagccaactatgcactagccactgctgaggatcagaacaaacactatacgagtacgatacggtacagtttacgtccgttcctaccagggccatactctggtcgccagtatgccagcacaatcctcacgacgggttggatgttccctgtttcgtccgagtcgtcatggtcagaccgagcaagggcataccatggcgaataccgcaaaggtctgagtcatgcatacatttcggcgcatcgcgaatacgccattgggctatgcaaccttcttcgcagcttgccgaaggacatcccttcgccgaccgatgtggatatcagcagcctcggtgtgtgcgagaggtttgtgacgagagaaaagggaactgcagagcggggaattcgcatcgatcgagtctcgggcggcttggatatgatcaatagacaatgcgtgtgtcatgtgtggacttttcgagaccagctttgtttgaacttggtatacaatgaggcattttacgatagggcggagggggattcctttttgcagactgttaaaaactccctgctgcatgaattgatactatagggtcctaaagttttataactcgaatgtatttgacccatgatcacatgatttcgtcgaaaattcaggtctcacgccaagcttttacgtaaaaataaagagggggtttagggtttttagtgcttagggggtttttagggtcttgacctgataatacaggcatcaaattacttaatacggactagcgtgtctcgctttataaataatccgttgttccgagtaacgcagccccgaaaaccctgacatctggccactccgctcccttaattctccaactctttcatcaaattcgtacacatctcatcaggcgaccatcagaagtctttcggtttcatccgaatattttttttttttccagttatatcaattttcaagcaaatcgcgcgaaagtgaataaataacaacaaggcttgtaggggcttgactcctgccctacattgcccaccgccttccatggcacgcatcacggggtcccgcatgacgcgaagtcggagccgagaagcaaatgcagcgtttatgccaaataaggggtcgttggagcgcaattgtaggtaattttccggttgttttttggtgtagcctcagcagcccttgaggcggatcaggcaactacgcattaagggaacatatgcatagttgtatattcctcaatgcgcgaactctctccataatcctttcatctgctcgtcccgttgcctcacctttcatcttgttgcctccatcacttctgtttgacagttgaatgtgttctgactttattcagggttaagcgggctggctgaggagccttctgctcctcctatcgggtttattgcacccagagatgtggtaccagaatcgcctgaaaaccaagaaggtaataccaatgtgtctggtacaaccttgtgtcccaatgatgcggagcccgccgattctcgagtcaccgatgctcgagtcgccgataaaatcgcgactcacttgccgttcgttcaacagcaggcgacccttgtcatgagcctgttggttcacccagacttcaacccggacagccttgcagccgagtcgaaaaagctcctcgattctggccacccaaatcgcaaacgattgaggcgattcgtggaagggctgatcgatgaactggaagactgtcctctttctcgtgatggcaagtccctattggacgtctcccaggctcgtcgtttgctttctcctgcgcaactagatgcatcaatcacatatatttacatgacaaattgcgctctgttgaccctcaacatgttcctccccagcattggcaccgaatcccagtcggaggttatccaacagctggactcccagtttcctgcatgtgtcttgggcaaccttccggacagttctacgccaaaggaacttggggcgagtgatactagcgaggctactttcaatcttgccttgagtatccgcacacagttcttcatcatggagttagaaagacgccaagatgagcaagacttcagcccactttccatcttgagacaggtctttgcaatagacctcattcccagcgaagattactcccaggatatccccggttccttccgggggttcaacttgccgggtgtctttcaggacgaggatggccatctccctgaaaatcttcctgagaagtttctcatcgccgtcaacgacagattcaatgaacttcacgaggagctttctgagtgggactccgttgatattggtggtctgaaaaaggcatatagatggcggtcgtttgaacgagaccttgcccgttggatctatgttcgtgacagcgaaattaaggaagacatcagacgcttgtcagaaagagtgcatagctcatccacacctcgtcgccttacttctgtcccggtcggaactcccaatcgacgagtatcgacagtgcctccgtctcctcagaaagaccgactggtgagcatggcaccggatgcaggtagagtgcccccgtctcctcagaaagaacgactggtgagcatggcaccggatgcagccagagtgccccaggcagagacgacaacgcaggcaggacagacagtaccggtggataaattgcctgaaaacaacgctcctcggccaagtgccgcttctcaaaatgttcctgaaaaaagtgtctccgaccaagtcgcacggccggcagcaaaagatccaggacggcgcaagtccaaaaggtatgctcactctactccctctctctgtggctactaactttcgtctatagcaactaccgagacccggcctcgttcgcggcactcatgagacgccaggctactagtcatcagcaacctgtctcgaacgaatcgcaagcgcaaaccatttctacaaagacaagcattgtggcccacgtgattaatcctggccttactgctagtcgcgcaaccgaggcttttgaaattcaacaatcccctgagctgggatatacagacatcggggatgactctacatacgtaaacaatgacgaggacttggatctcggccatggcccgggaccagatgttataatatcaaccagtcccccaaactccgctcgaatcagtcatgtcagccacaatcccactcctcggttatctgattcgcccagagatggaaacccacagcgatcagtcccgatcgctcggcgcttcctcgataagcagaataatgctagggttgtgtcgccgatcagccaatatgatactcaaagtactgtgttggggaagcgaaatcggaatgccgatgtcctagatgatgactcaactgacgggtcagacgatgagttcgagcaatataaacacaacgtcgatccgaggcgcagggtcgaaaagtctccacacaacgaacctgccgcgaagcgacaccacccccaggacaccgcgtggtctggtggagagcagtcgcaatcaagtatcaatagattgttccaccacaaccagtctagccagacgcaagtttctcgaaggatccaggcggttgaaagtgacgatgccgccactgatgaagagaccaccgttgcacagctcgaaccgccccctagtacccagggtcgctgggcagcctcccaggctgcgatggccaggaggagagttccgaagaccagccacaggtggacagatgaggaggatgaacgtttgcttcacctcatgtcaatttacggcactgcctttgctactataaagaagcaagacaacgcttgccccccagctgaaggcggtcccgtgcttgaacgtcgttctcaggtcaattgtaaagatcgtgctcgcaatttgaagagaaaatatctcaggtaagatatcataccttttcgtccttagtgtgatgtgtgcggcagttctaacccgttgttttacagagagggtcgaacacttccaccgaacttggataaggcagcaggttgatttgacgcattgataattacaagcagtcgtgtttgctcttgcgtttcttagcgttcatcgagatacccaatgagcatatgggatggcgtttttgagcgttcatttctaggctcctgctttcgttgttgcttttcgtatatgtttttttttttgccttgtatagggctcttctacgaagaaatgttgttaattgttgaagatttgtttactattgttttatcttctagattttcagtactgccaagattgaacgagttgttcttttacatacttatcgccacaaggaccatcttttttaatatctcttgttaatcacacaagatacgctctctaaatcaaaagacgtgcaatgaagtcaaagcaatactttcagccacttggcattgtccatgtgttcgttcctcttaggtatcctttctagcagatttggcaaccttctcaagatcctttcaatgcttttgctcgtttgcagaatgaccatccacaaggaaaagaaacgagaatggagccaggggaagtgttttacactgctgagacagagacaaaatccgagatcagatagaatctgtactgaaaggatacactgactcaaagtcaaggccagaatacaagagttcaattgctttgtatggaatgtatgaggaatcaacacgaagctaagagattatgacatattgcctgcctctgcctgttctgccaattgctttgttgagaaactttcacgtctttgatatatgacattgatagctgtcatagtgtctcaccaccaaagaacgttattcattttacgagtttcggcgtgcatcagctagataaagaaataaagattccatacagaatactctaacatgatgctacgtctacggataactcctatacagtacatagcagatgagacatgacctttgtataaaaacagatgtatttcctaagtctaactccccatatcaattcaacaccaccagaaaccgactacttgcatcaaaccagacattcaagaaacttgttcgcacgttattacattccacctctcaaaatgggcaacgacagaggcagaaacaagggcagaggtaggggcaagaaaagaagtcacattcacagtctgaaggagaacactgtcgccacgacggtcgcaacgaagctcgacaacaagcctaagggcaagatctcggacaagcatcactgtctcagcaagcgaccggagcatgttcggacttcacgatgccttcgtttgggccatgtggtccagtgtccgattcattctgacagcttcccactacggttgagcgagtgtgtgaagtgcaacagtgctgacaggcgacaagtgcaacaggagcgcaaagatagaaagaagtagatttttggtcctttaggttagatagaaatttcgaatccgatcaaaatcttgatgcaaacttcattcattgtacatccaatcccgccaccatctgagcacattcatctatcaaacgtgcaatgccctcggtagccgcagcgctccgtggaatattatgtcctccctcgtgttgatatgtcaatcttttcgtagactcagacaaataagctaattgcagtgaagcgggcaaccgaggatcaactcgcccataaacgtggagcgttgggatttttatccgcagctgctcgggcatctggacagtatccagtccaaatatatccgaggggtcaactggggccgccggattcaaatggaggtcagtatcaccatttcccccgggagtggtccatctgtctcttccccatttcaggatcgcttccttggatgctcgttcgcgcagagctagcttggtccgtttatcccactcgcgagcttcgtcagaaatggtcattcccagcgtttctaacaccgacaagaccggtccgccgcaaataaatacgacggctttgaaaggcaatggctcggtcggcttctctatctggtggaaccaaatataactggcaatcaggaggcaccctcgagaaaagcataccattccgtcgtatgggacattgttgtgttgggtaaggtatttatgaaaatcttgacaggcagcccgaatatcagacacagttgcctttagccaccatgtgtagtaggggccgtctgggtagcggagatccaggccggcggctggtttggacgtgaaagggccgtcgatgaaatgaaacgcatgctttgatggcggcaagtgggcggtgacagccgctacagatcgactgttaggttatttttgcttgcaggtttttatagtcagaaaaagcgtacccagctggtcctggaagatggtagcagaggaccctgtgccgtggatgcatagccatttcatattgtgtatttttcaagagtcaagacaggccgaggtaaactgtagtcaggtcaaggctaggcatcagttagaaaagtatatcgaaatctcgtatagaggtgggaccatgttgatctgcgctgatgatactcccaggttcgttacgcttctctttgggctttaaatgtgtcggctctgaagaaaaactctaaaattccaaagtcctaaatttctaggctgtggaccaagaagcatcaacggcaacataaacataccccggtatacagataggttggtgtcaaagagaagtaattggccatggcgaacacgtacgaaggctattagatttctaagaatgttgatttaatcttttctagcctttcccaccgatctgggaaccggatccacaggaaatacctgctggcctctccgaaaaccttcgtcaaaaatcaagttagagcgattccacagtggctctggcatgatccatgagttttggggatcgcgaagccacaaacgtagcaggtgacgacttgggatgttttcaattagccaattttcatgtgtacacgaccaatgcctgcttaccgattttccgaatcatctatatagctgtttcgagcatgtatcatgcttaggttattgatgaattgcatatcgcctctctccagcttcatggctacatgaaacttttctgcaagaaagtggagagcatctagtgcctccacctggatagagcttagcatattcatctgggatcgagcaccaaatccagaaaacgagcgtcgagagaactgcaagatgactcgttccggagctccatcgcaagctggttggtagaacaaaagcggccggtgagtgatcagaccgggctgttttgcactaattagggttcaatggcacgtcagcaaattgggtctttttactggagcatcggattatcatcgacacggtttgcacacctgggtatcggccagtcctccgccaatacgcggagtaggtcggggcgggtctccgccagagaattgtagacagtccacgcactcgcgagaagactttcaccgccatttacgggcccacttaggacgaagagggagacgatatcccccacatccgtgtgatataccacttcgccatctgaatatgctgccagggaaaagttttgtgcctcgttggggcgtcgcatgtcggttatgtgggccaacatgacatctgccggctgcccctcgaattgatggtcttgccgaccgcggatggcggcaatgtgcgaagaaatcccgacatagatgatcatattctcttggcgagaatagcgttctactggaattcctcgaataagtgtaaacccatagcctgagtgcagattgtctgatgcggaccgcaggatcgagtgcaaattcggtagaggaaacgtcgacgggtccagagtctccattggctgattcagttctgcagagttatcagtcttgagcgaggaatacgagagtggctggctgactttggaaatgcttgagtgctgcatctatctcgaccagctgcggagcttgtaaaatcaacaggtacggactctcagagcctgcagcgtgattcatcgagatatttcctccttcccaggccatatctgcggtcaatctctggggaaatccatgaggaaggattttttccactggtccttcctgtgcatagcggaacatacgagtgtcgtactcgttgcgatctggtaaataagggagttggtcgaatgattgtgccatggtcgccttgagatggagtattacagttggaggcacaaaatattgagggcatgaacagagtgaatgctttataattacatgggatgtctcaggatccatctctctccgaaatattttacagttttgatcctgaagggacgtatctcgaatgtgcggccgtatactccgcagtcccgcaccaactcttcgacatcacctaatgataatccgtaaattattgtagttcggtgaatgtgacctatcgagagtaaatacacgggtatgtgatgatctacataaactgcaagataattggcaattcagtcccgagctcagctctgggatttcaaatggatcagacagaagcagccaattgcgaagcttcaaatgaaaattactattgtggaaatgcctaccgaggctatttgggattatttaagaaagacaaaacatgaataagtagttaatacttgggaacatattcattttatcgtctgaagttcctaacaatcaccagaaaacatgaccatcctctccaggcacgatcgagcattattcgaaacaacgaaacgtgttcttgctgagattgtgaacgaaggactagtttatgcaaagctagagtccactgcgaccggagagccacagatactgtgcctacagagtatactcaacccccaggatggaaccttggtcaaggtgccgatcaaagctggcgctgtcatcgagacaaaagatgatctcgtggtgtctgttgtacgaccagacagcttacagccacctgtgattattgcggataccaggaacggagagttggacccaggtacactattcaagttcctgagtacttcgttcagtgacgtcgctagtgagagagtagtggatgagatcgttcaggaattgcgcaattcagcggccaatcaaggtgagatagcattgatgtcacactgtcttcattgtactaaaaatatccagagaaatggctagagattagcgaatcccagccattgttgagcctcaaggatagatctgctagctgggagcggacattgatctatggccacccgagtcatcccgtaggatcccttgataccgaacctgctggacaaaattctgactttgacattgacagtaccatcgattgcgttttgctcaagcgccgctgaagcccgtcaccgccgcggatatccctgagatgctcaacccaactctggcatttgtttctgttccacgtgccaatcttcgtgtgacaggccacttcgagcaagagttgcaaccactcctggaaaagcttgaaattccaaaaacaaccggtgaccgagtggttgtcccttgtctcgctcagcaattaccctctattcaccagaggttcccggataccatcgttctaaagcttatcgcggactgtgccgatgcgcaggcatcaatgcgtactctcaccatacgaccagagttggagttcaagtatcacttgaagctctcactggcttgccagataacctccgccctgcgaactatcactccgtggacaacttgtggcggcccggtccaaacagagatcttggaaaatttacttccaaaggacctctgggttttccgagaggtagcagctgtatcaggcagccaggaagatttcaacgaggcgcgccacctttcttgtattttgcgagatagcctggagaccagagctagggaaaatgatgaaactcttatcattgccgcagcattggcccagaagcctagtggagatagtcgtacatatgcggagattttgtacagcttggaaacaatctcccagaaacgggaatggttccgaaggtaagtgcaacgatcagccacaaatatcataacagatgctgattcccgtaccaacagatacgttacggtcctatttgagcttgtgcttcccccattggtccagtatggaatcggactagaaggccatgggcagaatcttgtggcccgtgtttgccgtcggacaggtcaaatcaaaggatttgccgtgcgcgatttcggaggagtaagaatgcatgtcccgacgttgcgaaaccatggcgtgagatatgattcgctgccccccggagcagccaccttgacggatgacttgcagaatgtgtggagcaaggtagaccattcacttcttcagaaccacgtcgggctcctgcttgagtcattgggattagagaaccatggaggatggacaattacccacgaggtcctatcgacagtcttggggtcggataaaggctctcccgggtataccttgttcgaatacttcaccaaggacacaatgcccttcaaatgcttcctgagaatgagaatggagggtaaataccgtgatgtgagtcttccgatgtggtctgttgctcaaactattacgaatctctgacgtttttcccgcagtacattgagagggaggttcctaatttgcttcatgtcacttagcaagttcaaggtggatggaagagaacgcaacgcgagtatatatcactgggtgaattgggaggttgatttggtcaatacatgtatttctttcgaaataataccccgcaggaccgcccctcttcctttctctttctcttttcttacaattccccgacttctacaccttgaacatacagcgaataccttcgctgtgctctcgtaaacctgatgtggaagaatacaaaaccgacgcatattgccttccaagcacacaatcgacatgtcctgacctgtttacaattcgacgccgacaagattatagtcggtagtgacaacgccaaaatcagcgtgtatgataccaagaccggagcgcttcgagcaacactggaaggccacgagggtggtatatggggactcgaataccatggcaatactctggtctctgtgtcgactgaccgatccgtccgagtatgggacattgcaaaagccaagtgcacccacgtgttcaaaggtcacacatccacagtacggaccgtacagttattgctccccgttcaaattggccagcatccagacggtacgccagtgatgatgcctgaacaacctctaataatttcggggtcccgtgattcaaccatgcgggtttggaaactccctcaacctggcgacgaggagtatttccctcccgctcaaagtgacgaggagtgtccgtatctcattcatgtattggctggccatcaacactccgtgcgagcaactgcagcccatggggataccctggttagcggtagctatgacagtaccgtacgagtttggaaagtatccaccggagaatcactgcaccggctagaaggtcatcgatacaaggtttataatgtatctttggaccatgagaggaaccgctgtattagtggatcaatggacaacatggtcaagatatggtctcttgatacaggtgcgttgttacataatcttgaaggccactcatcgttagtgggcttgcttgatttgaaagatgatctgctcgtgtcggcagctgcggacagtatgcttaaagtctggaaccctgcgaatggccattgccagcacacgctgagtggccatacttcagcggtcacaagcttccagcacgatggtcaaaaagtaatctctggttccgatggggaagtgaagttgtgggatatacagactggtgtgtttgaaagggatcttctcaccaaccttagcggtgtctggcaagtccagtttgatgcccagcgttgcgttgcagcagttcaacgtgggaatctgagctatatcgaggtaagtactcatctaaactgatgtgttgtcataatttgctgatttatgaagattctcgactttggcgcttcccctgactccataccaactggtcggctgggggagcggatactagtcgatgagctaggtcatgagatcgaaagccggaagagacaaaggcagaaataatctagtgtttgattagagtttaaccacaacgtcctcaaatatttgtactatcttcgatattactttcttaaaaatgccattggcaaaaacgtaaattctccgaaaaggatatcggagtccatccgggagtaaataatgaatgctaatatagtctgctcatgcaaccccaaattaaaaacgagtgtggaatgcctatcccaagacaggcagtaaatgcaacacaaatccgaccagcagatctaacacaaggaacagaaacggtatatcatccctaatatcacaaacgccctgttgacgaaccagcgacggtataactgtacatgcaatgtagagtacagggaatcaaaatgacagtatatgcagcttctatctcaagacctgaaggttaggagcttcacagaagcaagcccatacccacaaaaacagcgccaagcagtgaggatcccgcgcagactgttccagctgcgttgtttgtgggcgtgggcgtggcagttgcggaggcgaagacagcggacttcgataaaacgttgccactcttagagttggcagtcgataccgcggtcacgatgccggttggtgggttggctgttgaggcagcgacaataattccgccagctgcggtggcagcagtgggtgcaatagtagtggaggcattttcagatgcagagggttggagattctcagccgcctggatgaggttaaaggtatccgcgccgccacctagataagtatgctgtcagtcatgatcttgtttccatatggaatattataggtgactcacagcttcctgcaggccatccagcgcagggcacatcacatttactgtcggcgatcttagccgaatctgggggcatttcgttgccgcagtagcacatgttgccacggctcagagcagcgaccttgtaattgtcctctgcgcattgggcctggcaatgtcctggtgattggtaggtgtaggggccctggttcttgaatgattcgatagcagagtagcagcccatactggcggtggagctaagcgagtatacgggaagagctagggcaagcgcggacaaaatgtagttggaatgcatgattggtaggcgaggtattcgatcaacgaattaaagagtgaatagttgttttgagaaatgaaggaaagtatacgcaaaagagagagttgtttcaggtgccagggaggaaaaaaagggtcccatcaagcatctttaaggcggccgtttgtttgacacccgtcggttccatttttacgagtgtttttctgtggagtaaggctgggactgacgacatcgatgtccaatcgatcgactaaaagaggcaaaggattattctgaaacactaagcgacatgttctattgaacccgcaatggggctacatagggttcattggcttgcgagcggacgatcgccgatcggcatccccaggtgtggcgtctcgtttcccttttgagcgaccaatgacggcggacggctactcctgagtcaaaaagcatgaacttgagaaggagttcgcgtgtttctggtttggcgcttgccttgatcgagcataggtagagtgggtttagggtgttgcatttgtgaggaatctggcattgctggtcatcgctggtcatcgccggtgaccccttgtttctccttttctcctttctgttagtattctggtatcctgggtattccaaatactcttcatcttctgcaagatatcaggacagtcattgatgtgtatggcatagtctaattgggaaactggacatcgaaattgagtatcaaaatgaatttggatccatggttaacccgaaccttccgcactgttggatgccttgtatatcaggcaccttaccttatctaagacatctcaattcgacctggcggcccaatattcgggcaccctttttgacccagggatccggaacctccacagggggaggcaataatgatcattgggttattttactcgttcggattgcgatatttgtacgttgtacccgctggaatcttcccgtcaaatgccggtgagctgagctgtatatattgtccacgggtactccgtccgtactccgtattccgcatacctatcaatgcctatatcaatagtcgacggttcggattgaaatacgagctaataaactaagtaaggctaggtgcagggatctgccaataattccagttgataatgaaatccgacaggaaacatctccatcgcatagcgattaagcttcgcggtacatcaactgacattgtacgataccgttgacaattattcatggctgagacattaaggctttctttatcttagctgaacactagctccgatctattacacggacacgaaaccttgagctgggctgagacatttcctactttcaatacacttgaacatggaaaaccaaagttgaactgccaatcccaaaatgatcaacatgtaactatacagcacacttaccccaactctcggcaaaacagctaccctaatagggcaattcacatcggctatggccgccagccgacctcgggagaggggaagatagcaagaagataagataggccttgacgtgcttttgacatgctctttctgggctattgtgaatcccttcacgtcaatttcgaagacttataaatattttgattcggaagtattgaatcaacttagtccgaccatgaaaaccctcgctctcctcggcctggccgcagtgccatcgctagctctcaatatccccacacagcagcatctcttctccgacaacgatctgtcgggtcattataacctgctatcaagcccatctacacgggaaacctgtccccagccgcccaaggtcagcctccccgatgatggcctgcactcgtcgcagatcttcctcaccgatgatgctttccgtgctcgccaggcaaagcggctctcgcgcgcggtgcagatcccaaccactgtgggtgattatatggaagacccatacgatgaggcattcgagcctgtagtcaagttccaagcgctgctggaggagctgttccctctagtgtaagaaattgaccaattgtgacccgccatgaatgagaactaaacaaatcacagacacggccgcggcaaggttgagcacattaaccggctcggtctagtcttcacctttgaaggtgctgacacttcacgcaagccgctactcttcatggcccaccaggacgtcgtcccaatcgacgacccatcagactggactcacccgcccttcgaaggtgtctttgatggcgaatggatctggggccgcggctcaagcgactgcaaaaacgtccttatcgggttattgtctgtagtcgaagacctgctctcccaggactggaaaccaaagcgcacggtgctgtttgcctttgggtatgacgaggaatcacacggcttcctaggtgccggggcaatctccgcagctctggagaaaaagtacggcaaagactctttcgaatttatccttgacgagggtggaatgggactgcagagcctgggcgatgagtccgacgccaacggcgagatcttgtatgctctgcctgctgtcggtgagaagggcagtctcgacctcattatcaacattgccgtgcctggcggccacagttcgatcccacccgcgcacaccggcatcggcatcatggcggagattctgtacgagctcgagcgaaaggagctgttccccgcctggctggataccgaccacccggcctacgggatgctggagtgccaagcacgatactcacccgaccacgttgagccctggctatccgagaaactggcagcacatgatcctgccgctcttggcgaagctgttgccagctcccgcggtcccgtagtccggtacacaatgcagacatcgcaggccgcagacctgatccacggcggtgtcaagacaaacgcgctgccggagaagatctctgcggttgtcaactaccgcgtggcattacaccagacgcccgatgagctgcgtgagcgcgctatccgacttatcggccctatcgccaaatctcacaaccttactctacatgttgccttccccggtgtggcggagtccacagaaggagatgcgagcgaccgtactctcaagctgtcccctctgagtgttcctctttccccggctccgatctccccaacagatccgctcacatcgaaggtgtgggcgcactttgccggagtggctcgtagtgtttttgagtcgcacccgaacccacttgccaaaactgcgtctggttctaagccgacggttgttgtttcaggagatgtcatgactgggaatactgacacgcgcttctactggtctttgtcggagaatatctaccgctggagtccgtcgcgggctggcggagcgctgaatattcatactgtggatgagcggattcgcttggatgtgcatcttgaaggcatcatgctttactacggtatgttattttttcgttcgttgttccttttgggaaacttactaatttaaattagatctgattcggtcttttgatgcctgggatggagaatccgagtgaacatgcttgtccattctcagatactttgacacgtagatatgaaagtctggtatatacctcacatttttggtccagggctggatatatctcatttcgaatttagcaaatagagcaaaatcagtccaatagatcacttgttttttcacaccctctcaaaggtgccatgcagctcaaaacttcatattgggctagtcacaccgagtcaacgtaatccaagcatgaacaagatgtaattgaggatgatttgcacatttttgaagggacataaacatatagtgataactattgaatgttgatcaccttatacttcggtgtatgggataccgcagcacgtatttgttatataattgatatttcccagtgttagagcatctgaacatatctccagatgactggagagggtgtagaagtcacagattcatgtatatccatcaaatactcaaatatagtatgtgtatgcgaggatttcacaaaactcgcacaacccatgccaaaaatcaaggcaatggatgggtataagcaagaaaaagacattatcaagtgtggagtcaacgaagcgaacggaaggtatctggcacgtcttccaccacgactggtggcagctatactgggccaggacttgaagcgaaagtctttgcgagagaagaaaaaggcgaccggcggggaaaagacccgaaggcattataagtgaaataaatcaacaagaagcgaaggggtccgctagcggacgaggataggagcgaaggaaccaccgataacggggcgagcgatgaaagtaattccgggataactaggtttcatcagcaaggagcattacaggcttgagagctggttgacttactctcccgagatagtgtcgtacagatcagtcagggctcggttggtcggtgtctcattgatccaggtcgcgagatccttaatgaacatagaccgagtatcgactgaactgaccgctgccgcgaagcactcccagtcacctatcgaattgtgagtacttttctaatatggtgagccgtcagggtgtttaccttttgtgtatgtgtggcgggtatctagaggcacaccgtacttattttcaacggtcgggtagaagtcgctctgcatctgatagacagactgtggaacaaagtccaggcccagctgggcatcagcgaagatattgtagagcagacctgcagaaatggtaagcaaggcttcatagactggaagggcgctggagcttaccatggctagcggtgtcgccgtacgacaaggtggtatgtggtgggttagcatccttggcaatagccaggtcctgccactgagtgatgtagtcactggcgatgctcgagaaattagcagcgtcggcggtgtggccagtctggttggcaatgactgccatggcctgaataccgatcatgcccttgatcgcgaggttggtttggttgctaattatgccggttagttttggatttcaggaagggcagggcttactcacgctagagagccagcaaagtcgtccgtagagatctggttcgcaggataaagcgagtcctcgaccaaataactggtccactgcttgagtagagtgtagtggttattcaaaaagtcggagtcacccgacttctgcgcataagccaaagacatgatgaccatattcccgcactcttccaaaggcattttctcgtcgttgccattggggtggcccgtggcgttcggataagccgagcctaggtcgtgcatggaataattgttgggatactttccagcctcttggttttcaaacagaggagtgagcacgagtttcaggagttcggggttggtgtacaggaaaatcggataggctgggaagataacatccacagtattcatgttgccgtcggaagagatttccttcaggaacagatactgtttgtcttgtgtaccacaaagctgggtagcagcgaatgcctgccgaaccgcgagcgaagttatagtgaggtagtcctggccggctgtttcaattgaatcctgggccaccctgctatcgaaatggcttgcgagattgctcgattccgcatgatcgtggtggaagaacgaaagtgcggccaactctgtatcgaaataactcttccacaaggacggtactggggcatactgcgaagcgccttcgtactgaatagcttgatcctgtgtcagacctagtgagaagagcgtgctaatgggcgacgaatcgaccgagcccagatcgtatgagaacccgaatacgggccaggtggaggagatagctcggaaattagtgtcgacgccattggtgagttttccattgctggcaaactggccccggacgtcggtatccgcaccagactggtgggtcatgtctttcgagtcgtcggtggcccagtaccagttaccccattcgccctgctcattgttttcggaaaaggccaattgagtctgtcggtgtaccttgtggtaggccacaccgtcagtggtcccatactcccattctgcaatggcattccggtcacccgatacccattctaacatgtcgtcagcccccgcatgtaagaaaagagaccagcgcactaacctgcagagatgtccgcgtagacctgtacatcatgcgcctggccatcaagagaagagacctcgacattaagatacgagaaaacgagggactggcgcttgaagtcggtgggtgtaacaggcgacaaaaaagtaatgttcatttcaagcttattctccacgttcatagtgaagatacttttagtcgaagtatactcaaacgctgtctgattgacggttttcgacccaggaaggcccatccaagtataggtattgccatcgacgcggatcatacctgtccacccggtgacctgattcctgtatatcattagtataaaattcacatatagtcaaaaggaacttactgccaaaatacaggccattgaccagccaagtacccaccattaccaccatcactccctacatcaagccaagtgctgaggtacggtgacctaacagcgagaggtatagccgggggacgagcaggggagaaggtcgactgtgctccaatagaggacacaaaggaagcaaccagcagactgaggcggtacagctgcatgatgacagagcttgacggaagatgggatacacaaagtccaaacaagggcaagattgctctgttatttatttgcaggaaagggaaatgagctctagggagcttgactgcatagcactctggtggggccgaagaaagggatcggcttatgtttactgaagaggaatgccagtgacatttttatagtcaacctcaacccacgaagagagggggaaagccaaaggcccgtccgagacccgcatgccagaatgcgctctctacggaggaatatcaaagcggcttggtatatttgtctcaataaatacgaagtgctctaatctgctgacctccctcaaggcccgagtggaagaagattcatgctaaaggtacaaagtgacgttagggggatcaggacaggggtattcaagtggagtggctgtggaatggtggtggaaatggctcaattcaaagtcaaatccaaaaacgcggtctacatcttccggaagtaacggcataccttcacgtcgcatggaagacaagcagcggtctatgcggatcgacaaagcgatggcccagtaaacaagcgcatcggagtaatcccgacttctagttcggtgcgcgccttgcaggtgacagacttcatagcggtatggtggcgcaaataaaggtgtagaagaggactggtgagaaaaagggatgcagctgcgaaagaaacggaggtttgagggcatcgccgataggcccaggacaaataatgaggcacgagtcaagcgaattgccaagttgatgtccttcgtgatagtatcatgcggacagatcgtcggctttacttcatgcatgtaatatccgataaatctgcggggaaatggcgatcagcagcgtggcattcagcccatgagagaacagaatgaagatatttgaatagccacggtatctagaggacggaagaattcgggaagctgcagagaataatcatggcttttggtctcaaatcatatgggttccccttgcagagtctgcgtgtctctgcgtgtcagctttggcagcggcagtccgatcggagacaaaacgacttcaaatttctatcagacctagactcttgtgttgcatgaaccgtgtatgaatacagagtacatgggccgaggtcgcgtgcgcgaggtagtacaatgcatctagtttgaagctcacgatccacttcctattgaacctccttgctgcatatgtcggcatattcggttgccgacatacattttccaagacaagaacataaaccttacaattcaatagaactacgctttcggtggtctccggatattatcttcctttttgtcctccggtgaaatacttcgtgtgtcagattctagcctacgaccggccttgctactgtgccatcgctcgaagggttttattacaccccgtgatcttgcattgatgattatttacgtaagaacaacagagtgggatcgtgctccgcaagtccaagggcttctaggcaaaaggcaatgtcctcaacctccaatcctccggagtaatggtctattgtaagcgaactctcgggtttgttgtggcatgtggagttccccctatagggtttgatactcctgccgatcaagaatccaccaccccactaaattgcttgtatagcatatagcacgtctatttaatatgcttttgtacaagagaaatttactaggaaacatatatgagatgggcgatgagcattatcctacacagttgcacattggttgattacctcttcttggtcacccagattgtataactacctaactacgtacatcgggttgtgaggccctttattttgctatatcttagtagtttaccctggagctagccttccagctgtttgcacgcccatctagcctctctgagattctagccagagaaaagagaagtcagatggctgtgcaaagaattggaaggctagctccagggtaaactgctaatattacagcaaaataaagggctttataacctgatgtacggatacaatctgggttactaagaagaagaagaagagaatagatggaagatgatgatctagccactgccatgaagcttctctaaatagcttcatgtggacaaagacacaaagatctcttcctctagaatctaggagaagcatcttctgcaagatgagcaaagacagagaccgctaaaccgggtctctgcagactagataaagaagctactaacacaacaggaaatatgcaaggagagtaagagactgccaaagagaggtttgcagaactgcataggaaagagcgagcatcggacaaaaacgactctgcaatgggaaccgtttcgaggcctgtttttacaataacagcatggagaactacacatagtatagcctttttccatgctatagttacttcaagacactcgcattattactaatcatattcatcgggaagccctacctaagaagcagctacacgcaatgcacgttagatatcaggagacaatcaaaagtaaatatacaaaaccaaagccaaggatatagagagcatacacgcaacaaccaagcaaccaggtacaaagtaaaaaaaacacacgccttcagcaggatccgaaaagcacaatcaagcattccgcgccaactcaatacaaaactccccccaatcctggcccccattcagcggcagaatctcctcggcaatagcctcctccagacgctcatggtatcggcgcctgtactcattcttcacgaggtcgagatgtctaggctcccaatgcagccgcacgagacgggaaatgaggagctctgagcgctcgcggccggtccgggattcgcgcagggcctggtggaggaggagggcgtcgcgcattggtctgttgattgcgccgttgaggatgtgggctagggtttcgccctggtatttgttagtaaggattcgatttcagtattgactggaggggcaagatattaattaagtacgtaccaccagattccgcgacttcgcaatcatagccttcgcaaaattatgccggtagatatcctcgtacgagcgcagcacctcgcgcagatgcgaatcactcctcaaaacaataatatgaatcatagcagtctcgccgccctcgcggacaatcgcgcgatgcaaatcctgcacgtcggcgcgcacgagccgtctatccagtgggtcgcgatcatcctggcgctggccctcgagcgcgagcaaaatcgccatgcggaacttgtccgcgcgcagctcggagcgcatgcagcgctcgagactgttgtcgtagcggctgtcgcggaaggagtgtttgatttcgcggattgcggcgttcgtccggcccatcagggactcgattaggagttcgcggcgggatgtcccggcttggtagtagcagttcgcccagtaggcttctgattcccagcggccgagggcggtcgcgtagcagactttgccgaaggaggaactgccgagtttgaggcggaggtgtttggcgatgttgattccttttccttggaggcggacgcggtttttgtattcgtggcgcaggaggatgatttcgtcgcttgttagccggggcaggatctggatcatgggtctactgtcgatgttgcgtgtgtggctgagggcggcttgcagggcggcggcatcggggccggcgtcgtagaaggagacgcgtttccggcctgtcgttggggagacgaggactcttgcgtcggagctgcgggtggaggagcctgagtcgtggcggccgtggctgatttttgggtgggtgaggcgtttgtcgtccttgcggttgtcgcgcgaggagctgcgctctttgtctttatctttgttgccgcgggagcgggaatctttctcgctgacacggacagacgagcgcgagcgaatgtgtttgctgcgtcggcttgagtctgacgctgagtttccgtcgagtggttcaaggtctgagatttcatcgtcgcggatggaggggatgatgatcgcggatggcatcggtgagatggactggtaggttccatgatacggctccagcagcggactacccgggggatgagccgaattaggagcactggctcttccaacagcgagattattcgacgaggacacagagctgctgtgtggacgagcactcgaccgactcctgggcgcgatctccacaaactgaggctcgggctcctgtttattccgagacggctgctctggcggttgctgcgactgtccctgtgactgcggctgcgcctgcgattgatacggatacaaattctgcgacgactgcggaatcggcctagaaaactgctcatgggtagcagccgggtatataggcctaggcgcgggcggcgcgggcggcggcacaggcaccgtcttcgaagaatacttcacattaggatcaagctgcgcatactggtacacgcccggattcgcataccccacagcaggctgcgaataaccagtctcactcgagggagtacggtaatgcgaaggcgcataagccgcactcgtcggcgcatacggagcctgctgggccggtaaactagtatactgcagcgacgtagctcccgagccagcggggtagtttgacgctgcagggaacgcgccgggcatagtagtagccgggccaggctgcgaggagggcggcacaaacccagggcgttcgcattctggcactgaggcccagtctactggtgcggtcgcgtaggttggttgtcgcggcgcggacgcggaggcaaactgcgtgggctgggcatagctgtatggattcgggcgcgcgtagctgggatggttgcctggcgcatcgccgtaggctagatcatctgctgagtcggagtcgtggtgattcggattcggattcacatccaaacgactgtcgcgggctggcgacgggggttgacgatgcgaccgtgacgaagcggcggcagaagcgcgctcctcgtctgagtgttggtagcggtcatcgcgagggtccacgtcgtagcgggcgcttcttggggcgtgcgagctgccggcgcgcgactcatctgggttttcgcgacggcgcgagctgataagcttgtattggcgctctatttcggcttcttcgtcggggctgtaggtctttgctctggggatttcgacggctggtgagcgcgaccggcgagagggggagggagagggagaggggattcggttgtcgcgcgaccgcgatcgcgaccgtgagggctcgcgggcgggagatttggatcgggtttgcgaccgtgggtcgttcacttggagggacatgtttggtgtggggttttgatcttggtatgcaatgtgtgttcaacgggtttatttattttctttttctgcgaggtcttcagtcgcataaagaagggttggactggagggtttctttgtgtgaggttcactaggccattctataattatagctatgaagcctctttgttcaggtgaattggaaagaaaagaaaggaaaggaaagataaagcgaggtttaatagccgctggcattcgacggcgccaacttacctcgagctaatctgtgacacttcaccctcatgtagcaagtattagcggctcttattggcttacagctggactgaagatcgtcgtgaccagcgcttcagccgcagacatctgaccaatgcgcatgtcagattgcaaaagaggaggtcattcatggaaggttactgtagaattacggagaattcaagataaactatcaaattaccgtgcaaacaatagatgaaaagcactagtacaggtttcggatttcgaaccgttttgtcagaagagaaaggaaagcaaaggtatgacataaaagaagccctgcgaggtgccaggccgcgaagaatgggggtatgtgcagaagagaaaactatgggaacagaagaaaggggagccgtttatcgcttgcgacggccatcgtagggtccctgacgaccaccgtagttttgcttctgggactgcgtcgtctgtccgttgcggttgagacggttggttctccagcgctcataccagaccacgcgactggcctcccgcagctcgaagcgccaatcggaaaagacggagtccttcaagcggacaaagtcacagtgctcggcatcatatggatctgcgaaaccccaggggaatcggcgaccgacgggtttgtcgccagctgccagcgagtggggatccggcgacagaatcgagaagggaacgtgctggttggtggcctgcgacgcgttggaccggcgagtgctctggctgcgctgcgacggcgagccggggacattttcggctgcggtctcagactccttggcttcgctggctccattctcagtctcggttttggtctcaggctcttcttcatccgcactttccgacgatgagtattcatcttcctggtcctccaatgtcaagatctcaagggggtcgatattggcctgcttcaagctgttccagaccgccttgcggagatagctcatgtgggcggaggtaatcgtatccgccttgctgatcaccggcaccacagtggtcttgcccaacacggtgcgcaacacctggatatccaagttcttgtccagaatcccaatgacaggcgcatcggtgggcttggacgtgccattggcagcacgctccgccatggcgatgttctcatcaagacgcacaggatccagaagtaggaaagtgcagtgaatgtgggtatcacgaataccgggagaccggacaaccttcatctcctcggcgagggtctcctcaaacttgctttccaggaagcctgtcacgccgcgcagctgaagatctgcgatgttccgctccaggcctacagagtcccacagggtaagtccgacacgttctccgtcgaactccgtttccaggtattgcgatgtgaatccttcccaggctgaggtttgccgctcaagctcttcgacttcctcaggagtgcgtgaggggtgcttgtgtgcgggcatggtcagggcactgcggaggaagttgaggaatgaggttttccccgagttacgagcgccgatgacaagcacactatacaggttccattattagctggtctggttattgatgtctcttcgcgactcacttgtatggggtagggtccttgcgacggcgcacacgacgggggctgttgacggtgctgacagcactgctagcatagctgtaccgaccacggtgggtcatgctctcagagcgcgcatagggatccacggtgtttgttggcgcagccatagatggcgcgggggcttcaggctggcgtgttcgggctgcgaccttatcgcgttcctcgcctccaaaagtttccagttgcggggcgggggaaagatcaggcaagcggggagggaccttaggggcataagactcgcgctgacgacgcatctcatcttccatggcttgggttttagacatcttcttgcgagctttgtcgcctaggggttcggtggatttagaacgacgaaggaagccgagggaggtgcgacggttgatgtctgtttcaggtcccaggcgcgtggaggttgccattttgggatgggcgtttgtctgttctttcctgattaggttgtttttcttttcttttcctttctcttattatttgctcttattaccaggcagtcctgaaggtatctctatcgggggatctcgatatcgcataacccaccacctgatgtcagggggaacctcgggaactgccactcaccaatagaacgagatatatcggagtccaacagcgcttatagtgcaggtcagatccgatggcgcgatttgaaactgctctgaaacagaatcagacggaatcaatccacctggtctgcggatgtatcgggtttctcaaaaacgaaggtatctgcaacagagaaaggaaagggaataagcgagagtggaatcaacacaatacaggtgcccaaccagtgggtgaaggaggggattgaaattcggccctgaacagagttcgaacttcaagctctttttttggggatgttttttttcttttggggaattgtaaataagcctgctcacagcatccagcaacagcggcgcttggagtaatgtttgaaaaggggaggagagaagagaaattcaattcacactaattctatcgggaagatcgagatgatattgaccatccgacgttcagacattcagcattcaggggtaaaaaagaccatccagagctgttccccacttgggagctttggtctctctttgttggttggagagctaaagacgggatgtatgggttcacttgtacgagtcggagtatggaggacaacatacatacagtttaagcaggttgtggaatacaacgtgggcctttagtctccacttggatattccactaaagatatacatctagacagttgatgtgttgtgttggatgtatcggatattacggagtcaacgtgtttgtctggtttgcactcgtcgattattccccagttcggtccaaccgctgctgaaactggacattgtccggagcatcgcaccaaagctaacccgtctgtctctaggccaaaagtatcggctcatctctgctggaaaagccgagaacgaacacctaatcaaactaaccgccaaactacggattagtgcgccaactaataaccataacctagcatctgcaatacgagctaggtcaaattctgaaacatgcaatttgggatatcagcccaaccacgtgacatcctgcatgttgtgacgggtggggccaccgctggacaataatgaccttcgttgaggcagttcatcaaagtctttgtatattgtatatacggagtgatacagttggaactgtgttgttccctcactgcagcatatatacagagtactccctcctcctaccctcaaaactcgcattcccctcgagaaataacggagtggagcaaaagtggggtggatttccattgcgtgcaggaactttctttttgagaagaacggtaaaaggacgcgacggagtaaagggggagtcgaattaaaattcccttcgatgctggaactgcgaactacctctgctcttatctgattgttgttcgtgagggaagccagctcaaaccaagtcgaggcgtcgcatttaatatttactgatatcaccaggagcaacaagctctaaatccgagcgtctttccactcttatcaatataccgaacctattctcatatcttatcactattgcaatatccacagcccacctctaaggctccaaccccaactttaagccgcatccacggagaaagtcctgaacggaagcacaaagcacggcttggaaggacacaccagctgtctatccaagctcttgaacctaggaccattaggaccagccacattcttggcctcaccgaagagcgtaggctcattaggcggctggtcgtcaccccatctcccattgaactccaaccacgccacgggatctttagagtccaccgcctggaacgcagctgttgttccatcataggtataagtgtatacattgagcatgggatcccacagcacgccgcggtccgtatagtccaacagaaaccctgcaggcaggttgaagcccgggaaggtgtggtcgtgttttctgtgtgtatcagtcttgccatccgccagactacagaaacttatctagacttaccctggaattgcatagtttgcgtgcgtaccgactgcagagtacacatacggccgcttgtccttcttttcaacggcggcgtaggtgaacgcctgcccgctagcatgctggctgtaccatattgcgtcgggtgtgccgttgacgaagcggatcatgttatgttccctttattgtcagctagaacgactctacccaggcaattcttcacactaaccagtctccgatgtggtcgccgaattccaggcctaggactttgccgcctttgttgaatctggatcgatcagtataaatgtagacttaacttaggtacagtcgagcttacgcatagaagtagaagtagaacgcatcaacagttccgttaccgcggtctgcgatgataaggacactcgatgtaccatccactgttcgcccctgggcgtccggtctgatacctcggaaccaggctggctctgggttggcttcgatgccctctagagatgttaggtagacgctcgtattacccatcgaattgagcgtgtcgaggttgttgagggtcaggggggattccactccctcgatggccgtccagttgacattgggtctggtgtgatcgagctgctgttggatatcgctcggcatgtatgtttcctggctatggagccagatcaagggtgctgtagggcagaataagtaaactcagatcatcatcaataccatgtatcgcatggtttgtttaccatattctaagacatatggcgggacatcagtagccctgtcgccgagggatgcccaggccggtttggttgaagatagaccgactaccgccaaccatatgaaaagacgcatcttgtgtggcttgtcctcgagtactggagagcgacaagcgcccttttaatctctatgaggacaatcataccttgcacttacagcgatgtttaacccaaatgtttatcggcatgacctcgtcatgggcatgggattcgaggatatactacggggcgagaagcagatacgaaattcgaagtaatagaatttcataatcacaaggtcttctgctattccagcgatgctattgattcctcgaagtgtatgcgtctccttgacggggatcatgccagtgttccgagcagcggatcggagtttcaatctcagacacaagaaagtgaggccgtggacaatcccaaggtgtactcaggtggtatctctcctgcaatagggtgtgattgttgaaaagttctttgtttacctcctttatcctccggcataaagtatgcaatatgcaaccctcaggaatgtgagccttatatcaggtgcctcgtgggtgcagtacaagagtcacaatatatcttttagtgcccaggtggtcataataatagtgcgatctgcatcagatcccatggctgaatatcattgctctaaattaatgatgtcacctgcccatgaagctatcacgacgaatgttcgggcttgtatcgaatcaggttgagttacttgtaattatatgcatctgtataaaatggtgagtcccaccaataaaatcgcctacctgtaccagccgttgtacctatcttttgttttactcttcataatatcagttaccgtattcagcattccccatcgaaaccatgtatactaccaacatgtcggccacgatgagatctagtcgctcttcattatcacatgttgatcccatgaccaaaattaatagtacatactatatattgagctggactttcctctatatataattttcatttgtgcatttgtactttcttaaccgaattcatgaatccagcctctcctgcttcaactagtccttcctcagcctaaaaaccctcaaatccaacggaatccgatccccaagccaagtggcacgttgggtgtgatttcgctcatcttccgacgccacagtattagggtgaacgagagcactaagcggaccccggttaataaccagccaaggaacgaaggctccaaactgcgcaggtgtgaacagattcacttcgaacattgccaccggatgcgggccaatcggccggtcgaagaatctataaatgcgaagttcggggactgtttacgaagcataagcaagagatcaattgagatgagcaacccgaccccgaccccgcggtagacggccagacctgcagttccgttcctgggctggaagagtgcgctgcttacattctcgtctaattcgttcccagagcgctttggcgaatgcggcttggtcggggctgttctggtcgatgcgtcagtttcattgtcgcttggctttggggcccggcggcggcacctgcacttacttggaaatgatagatgtggacgtcgaagccaccttcccggcctttggagagagggtcggggaattccgagtaggctttgcttaatatgccatgttggggatttttcattgacttgccgtcttcggcgcgctcgctgcggtagatgataagtgtcttggattagatgtggttgcgggacacttactcggatagcggctcgaggttttcgtaccccgccaatggagatgggtatgagaaagcgaatgcgtctgtcattgtgagtagattgggattattgaagaagatgagaggagagcagtgggtatgtaaagatattggtgtaagtctccgtgcaggtagttatatggcgtattgacttgagttgatcagcggttgcaaatcaatgcaaagatgtctagtaagcattcaatcttagatcaaaaatgtcgtcagttagacttggagtatcatcatctgtcaagtctgcgggtgactttccgcactctgacaaagccgcggaacggacctcggtggtcaggatggtcgaggtcaactacgatgtacatcgatgtacgatgaataataaatgaaatacaattttaagtgagtatacaagatagcaagtactaactattggttttctgtcaaacagagtgcttgtttagaaacaatattggcttaatcaatacacttgggagattttacgccgttctctccacaaatatatttcagggctatgattatagaaacaacgacttattgaaagaatgtgatattgaaaatgtagctatttcgtatagcatagacaagactgcacaaaatatgaatgaaatccagactaaaaaatgaaagttacaatatacaccttggtatcacccatagcacaatcctcaaacgccgatcatcaaaacatccagtaagaaagactaccaagcagcccgaatgtcaatatggccatcgccatccacgaatttgccgcgatcccattcccgtccttcacctttcttcgaccactgtacatcctctggtttgctttctccgtccacacccgcaaaagcagtgttgttcttccatttatcaatgacggcctcgtcgattcctgctgtacgtagcctctcctcgcccttactcctccagcgctcacgatcgcgcaacgcctccattgccatgtcccagtcgtcatcttttgtcataagccccgcgacaggacgacgagatgattcctggcccatggagtctaatctgttttcatctagatgcacatcggtagccgggtcgtagccgggtgcaaagtgagcatcgatattgctcatactgtgtttatagacacctcgcccgcgcgagcggataggtggctcgttttgtcgaggagggagtggtcccacaaggtcttctaggggatcggattcgttgcccaactcattttggcgtgcagttaaagtagccaacggcgacaacggcgacagccgtctatgccgcgtgctgggttcaaggcgagaacggcgggagccatgtggcgatgcatcttcccgctttggtcgtcgagatttgtacgactctggtgagcgggaacgggaaatggaccgagcagaatgtccagattgacgtttttgtcttcgatggcgatgacggtcggtacttcggtccctgcgcggagaacgacttggagacctcgagtatgaccgctcacgtcgccgcctggtgtgttccttatctccgtcccgttgatctctcatagattcgtgatccctgtggtcacgccgatgtctatcgcgggatttgtctttctctccactcccatcatactcttcgtttgcccgtcgatgcctccgcgaccggtctcgttccgccgatggggagcgacttcgagttcttttccgatgtgaccgattgcgatcttcccgatctcccctccggtggtctcttgatcctcgaactttacttcgatcatcagatcggtctgtcgaagtggggaccaaggcacctgaagcacccgatgcctgatatttcagctggcgcatacgctgtcgtgcttctctttcttctttgagcttgagagctgtgttatgactgtctgttactttgatgagatttcgtaggaagcgggtattgggttttggggcattgcttgtcggcctgcaggtgcttgtcagtttcataatcatgcaaaccgcagattatgagagaaaccaaccttgaaggcataaaagcgctcattccttgagacgcatacttgatagaactctccttagcctccttggccaggatctgcgcaacatactcgtcgtccatgatccagatgagccacagatcgtaggactctgagggtgtaaaggagtgcaccgaggaaagtgaggaattcaaagaagagcaagtatatatgctaggccatattaaaattgaacaaagaccgaatcctctttagttgaaagaaaaccaaacgaggcgaagactcaaggcgaaagcgccttcctaaagtcgtctgaccgcctttgataaggctgtttactgtcccgcaaatgttatgcccgcagtggactcggcccctctaagctctctacattcgcaaatctcgtcggcttctcttgtcagaggcagattttcgatgataaagccctacaatatgacaaactcatcaactgaagcgcttgcagcccttcagcagctggaggagaatggcaatttgaaggaccgactcgcgattattcgcatcagcgagccaatttccaccgaagttggggggtcttacccatctccttcaaaaagaacctctgatgtttccgtgtcaaatttcgacgatcctactcctgcctcattggaggctgatcttgcacattacaaggtccgcgatgagcccgaatgcccgctatccagaccagcaaatactgatgttcgcataggaactattctccaaactgcgattctcctatctcgagcaagtaacgaaagaaaaattcttgcgcgccattgttggcgacccgcctatggttgtcggacacaatgagaacatggaactggagacgcaactagcggacgtgaaagcccagctcaaggcccaaaaagaagacgcacggattatgattgaggaaatggagctgatgggccgtgatttggcaagccgtgagtagtcaatcaccgtggaatttcaacatgttgactgaagcgtccgcggctatgacaggttacaaaaatgtcgaacttcaaactacgcagctctcaaccctgcctgcttcaatcgagaatctcgagtccaccatcgccgagctgcgtgcaaagcagatagccaccatggatccttccgatacgaatacttcctcctcgcagaaccttcctcttcccgcgaccttggcactgttagcagaacgcgaagcggaactggcagcattgaaccgccagctagccgctgtacataacacattgcctcggaagactcgagaggccgaggctgtagagagagagtgcagcgtgctcgagcgacggaagtcagatgcgatcgcgcaagcccgtgaagcccaacgcaagaagcaacagggcgaaagtgatggactcgaagagatgggacgttggtacaggggggcagaagagaccttgaaagaattggtagggacccaggcatgataacctgcaggccaagcctaggcttgtgtacgatgacatgagggacgaacgattgaacttatattaggtggggactggcgtttaagatctactatgcatatatgggtccgtggatattataattccaggttaagaaagtatggtaatggtatcattaaatcgggttccaaattgaagccttgcggctgttttagattcattgtattgcatgatcgtagaacatgagacgctatgcagtcattttgaacctccatggtatgaaggcgccccaagcgaaacccgaccgtactccattttttggggaatattgggaataatttattcctcctcctcctcctcggcgtcctcaccaccagcggcagcggcggccttcttgcggcgaacacggccgggacggccaccaccgaagggcgaggtgagggagaagtcgatgtgcttctgggagtcgagacggaccatgaacgagggaacgttgacgatctgcttgccgacgcggatgtgacgctgcttgatcaggacacgggcgtggtggatggacttggcgaggccgagcttgtagacgcaggtctggagacggcgctcgaggaaatcgtcggccttgagagccaggacgtaatcgagcttcatgcgggcctcatcgagcacaccgatgcggacaagacggcgaatgagggcattgccttcgaagagacgcttggggtccttctcgtcgagagtaaggagctcactgtggggaagatgaaaaattagcgctatgtccaccaaattcgatttgcctaggcccgatcgctcgaaacctcgcaaaatcgcagattgttccttgcacataccgagcagcacgacggatcttggagagggtgagctggacacgccacacctcgcgcttgttgcgcaggccgtactcgccgacagtcttgagttcagcatcactagtaaaaaatgttaggaatatgaacacgacataaccagaagcacgcttctggttagtggccggagagtactaacagacgagccgactcgaaggctatgatggagttagcatttagatattcaaatcgatcatgttgctgggacttcacttacgacgacgggggaccttgtaggtcttggaggaaacgcgactgcacagaaatcgattagaacggtgtgatgccttcaatttcgttgatatactcacggggccatggctgcggttagatgggcggaggttgtcgacaggaggtcgaaggatcaaatgaattgagaatttgagtgtgtgtgatgcgagccctaccctagtcctaattgggaaatataattatgtcagctgattatgtcattgagcctctccaggtccatgcccaggtccaccttctcttttcagcaacattcggaatagccggcccttcaatcgcctgaaatggatgcttgtatgcattctttttttggatatatttgtctggattacttggttttactattacagctatttgtcttaaagaacgtcaaattcgggacattttatgcatcgctgtgactcgggatctttcttgatgttgcaggcagatcgaaaactggcattatgctttcttgcgccatagcaagtaggcgaaggcgatatgagcccaaaatacttgggttgttgatattcatggcagtgagtcgctagagtctgaattctggaactggctgctggctgctggcttctagatagctgacatcgtgattccggtgcgtgaggatgatattgttgttgccattacagttcactacactgcatccccaattgaggcgtccaggatataagtgtattatattggaagatccccttgagacctgccaagcaaaatcgatggtgtagtcaagaacaccaatagtatctcccccaaacgttaccacctgcgcgctttgtttttgtctggtgagtcagtcactatacaagatactatatgactgaacgagataaattcagaaaggaattaaaaaaatccggcagtttctgaagcattggcatgaggagaagaaaagcattgcatgtttagtatttacaaatctcgaagtcaagaggaaaactcaggctttgattggccggaggctgattattgcgctaacccaaattcagaaaaatatttaataatccaaaagtggcgtagcgtggatttagcgagagtagacatgattatgtcatgtcaatcccacaaattgttatccgacactctagtttttcgtgttgaaggccccgtcgacagttaaccaccagcaccaaccacaacaccgccgtcatgcctcactcgtacggtctgcgcgccggcactcgggtacgttctgattctatttgcgacacgcgtctttttcatactgggaggacgacctggatcaactggatatgcctgagggaggataagtgctaacgaaacgacgaacagtatgccttcgcccgtggcttcaaggaggccggtatgatccgtctctctacctacctgaagacctaccggtatgctcaaaaccctcgaatatcgaattcacgacaagaatggaaatctgacggatatttttagtgttggtgatattgtcgacctcaaggtcaacggtgccgtccagaaggggtcagtacaattccaaaattccttcctgcgctctcgcccgaccgtccaatgcgatcatccaccatgagcagcgcgaaacccggaaaagaggacgagaatctaacagttgaacagtatgccccacaaggtctaccacggtaagaccggtgtcgtctacaacgtcaccaagtccgccgtcggtgtcatcctctacaagaaggtcgacaaccgctacctcgagaagcgtatcagcgtccgcattgagcacgtccagcactcccgctcccgcgaggacttcatcaagcgtgtcaaggagaacgccatcaagaagcgcgaggccaaggagaagggtgtccacgtccacttgaagcgtcaggccgttggcccccgtgaggcccacttcgtcaagcaggctgacaacaagcccgagaccgtcgtccccattgcctacgatacccacatttaaagggctcgctatcgaattgggacggtgtgtgcggttgttaggtgtttactgggttttcactccatttttgcctagactgaaatggactttgatacatgagacgaagcgcaaagggtttcggatgccctggcacatctctcgcctgtgcatagattcccctgaatgaaacaaaatcaaaaaatttccgagttcatgtctacatctttcccggtccagcataacttatatttggtgtattgttctaggcctgtgctgtagtgctattcgttctcgctctcggccttgatcgtcagccccatctgagatcagtgtactcagatcaagtatggttcgaactttgagtcataaattataatcgcttactagatctaaatgttattgcgatgatcattgatactatgctgtggcgcgggtggctttacgagtgtggcagagcgaaagggatgatcatgacatagatgcactgccaccgcgacacaagctctctcaagctactccgtatagcttcaaccaacatccgaatccgcacaagttgggcattgtcgccctctaggccacccaggtgccatacctaggctaatgaatgacctgaaccgactcacccatttaccccgattctcctgctttcgtcgaacgcccaatccccctaccttggcatcatataggtgaagtacccgatctcaagcaccagctaccggccgacatttcgcaagtcaaccgtattccgcagaccgcctctttcagctgtggttggctactctatcctgttctagacgattgactatcgcttgcccctacccaagggagaagctccacattcgatttgaatttgtccatgttgctcactctaaacttcaggcaagcacttttacccggtagcgcgggctacggatgaatgaatttcttgttgatgggctaagtttatgttgcattgtgagcgaacacctgaagcgagtgaaccgaattcctctagcactttatgtacccgattgtattaatcttgtggtatgtctaacacggaaaggttctagaagtttatctgttcgatatgttgtcgaatacacgaatacccctttgtgtttcagaccgaccatgcagtggaggtttcaagagttcatgttcgcatgtgaccgtaagtagagagcatgagggtataagcttattattacattcaatcggtctagattgatctttgtggtttggctaaaatatggttcctacgtaatggcttagatcgaagcatcttggataatgagggtctaaagttgggtacacagccacatgcaaagtccatagatcacgacacatgacgacattcggcgataactggatgtacgaaggtggagattcaggaacaatgaatacatgtaccttctgtcgattatcaagggcggtatgattgctggacagatgacctttgtctgatgcatgtcccttccctgtacggcatgcgatgaccagccactcccccgggttttacgcctcaggtcatttagaccaaaatcggagtttctgctgtgagtaggcccggatgccagactgaacaggctactagctgtcaagctcctatttaaatttagcgccggtcagcactataactactgagtttctgaaaaaaattgttaaatgcgcctgggttaaaaagctctgggtatacaaaacctggcaactcaatggatctccagccttccccaacaacaccgctgccactctgctcacccgggctatcttcgtgggcaatgagatagtcaaggcatgaactcatttggcttataactcctgcttccccccttcctagaagtcatcaatccgcactcttcagaatcatagctcgtaccttggctatttctgcaggaatctgcaccgctctcttgcaataccgttgagtagcttttctagctacgaagaaatccattttattccctcctctgtcaaaggccgtgttcgccaccgctttcgactaatttccgtggagatgggctctaataataagtaagccggctagtttgcccaggtgataatatatatgaactcccctgcgatacacccaattcaattcagttgtcattggtgatatctcactaagaatctgtctgacttttcgatttatctgttccatccgctaaccttgaccttctctcagagtctcgtcatccgacctccccgcgactaaagaccccggtaccactagcaaagacacaacatccttcggtcaagataacacctcgaagaagtctgcatccgcctccaatggcaagtcgaaaaaggggacctcatacatgctagagtcgtgggagaaggcaaccccctcgtcggagccgtggtcatcaaccaaagccacctactcgccaaagcgctaggctttggccactgttgttcattgaaattggagcttggagattgtaccagatcattgtgtaaaggattccgggggacatcggggcttggttcatctttttggtttggggtgctatttattggaaaggaaagacttgggagttatctagtcatttaactacggagtacggagtgaattaaatgagataatgatcgtcctagtgcatatcaatctaccaagtacatatgtagttacaacactgtggacgaacggcttgcatggagtggggctctggagctgtcttgctgatcatcacttgatgaatctttttttggcccttctctttggtgtcgttgtctgttttcctcttgcgggtacatatatatacttggatttgcattccttttatttccatttcacttcctcgatctagacaaggcaattgtagtcgggtactattgtgttacattgaagaatgagattcctttacatccatccacgatatctcaaccaaagcaagttgcagtgtcgttcaatcttgcattgaaactttggatgagccatggtagagatgctgtacaaccccacttggatccaaatccagtaactctaccgccgggagtacagctcgcatcactgcgaacccttttcttttttttctctccctctccacccggatttatgcatgattatttttatctaaagaataagtatcaatatccatccctcccaggcttttgaataagccgacaaccaccgatatgaagatcaatgtctgaatggggatgggggataggcgagtatcaccacaatcgcccaacttttgaaaagtatactcgtgcattattgttggccggggataagactgtttggtccaaaatgggcagcggttgagcttgccgttctagactcatcttaatcagtcaaagcgcttacatccgagtcgtctggaaaggaaattattgatttatcccgcagcagtagtgctgatgctgatcctgggattaataggccttttctcccaaccaccctggcagagctgcgcgtaaatgatgaaaaacagccatccaattcgctatatcctgccttcccaatccccgtattatgcaccttccccgctcttgccaatcaaatgtgagcattgtacggagtaatatactccgcacaagacagaagcaatgcacaacgcacggacttgaccattgaggagagctctcccatttcaacattcgctcagctggcagccgcatgaggtttctcaacacgatcgacgttagttttccgcctggcactcccgacaatggtcaagtccgtgtgctgttggatccatactgcattgcttctatcttgtgcggagtatgtatgtccggagtatggccagatactttggattcggccgatgattgccgtgtgttcgtattaatttctcgaatattattttcggccatcctattgcatttcctgcctgctccgtccaagcttctcggagatcgaatcgatacatccggagacattaaccgtttggaaataaccattccaacctttttttttcaactccaagtacccgatggcggtgggtttatacccaactggtcagctatatcgggtgagatgtgactgcatgattattactactccttacaacagttctaccgcataggtttctacatgttttcacacctaagaactggtgtagtgagggttttaagcatgtacaatagattgattgatctatacgatcttcttttcttcctcagcccccaaacctccttcgaatgtccgaactacaccacaggaaggatccaatgagttagaacggcctaagcgcccgcgattctaaagagcctttggactgcatgaaacctatcattcgttgccctagttttgtttgttgcatcccgaggggaggcactgcctcactgcttgtaatccactttgaccggtaaatcccctgctcggttgtcgactctcttattccaaaatgtctctttgccaatttggcgttgggctttgattgttcttttctttccaatctcgttctacataattatttaattggtactggctctggcactggcactggcacccgggtgcgagcgggcgtagagtagccacttctacgtacttaaggtcttcttttctcgtctcttacccttctcgtctccccttcgcgtctccccttcgcgtctccccttctcgtctccccttctcgtcgatgagacctactcttttgactaagcttcaaacaccattttctctgcttaatattattcgccttcccaaagaggtctatctatccgctatggactccactctcaataatgaggaggacgatgagatgatacattgtcctggaccttctggctcctttgcctcttcggaggagtttactggtatagataatgatatagtgagttttcatccagagatcctagcttcagggtcctaatgcttgactagtattatggatattgtgcttcaggagcctactcttctgctgatgtgacgagcttcccgaatacggatgccttccaggactctggatggatcaacaccaagcctattagtcaaattccagaacccccacagcaatacgaaaatgatctggcgtacatcaacccgggatatcccctgggggatgacaatatcccccaaagcctagaaggtgatctaggaatttcaattatcactcaacgaccagctcatccctcgggaaatcttgatcggaccacgattggaataccaaatcccacgcccttctctctgcaaccttcatctgaaccacctgccggcgtcatggaacaggttaacagcacctggagagctctcagatccaaccagcaatgtagttctgatcaagtctctcaaagcatgcagaacctcgaaacgatcaaaaccttctttcagtcaaagctcccggaacctcctgctgcatcaaccgagtactcgtcggaacaagaaaaagaaatgtatcgatgttgggtatgcgatcctcagacagctagagcaacctttccaacttttggtaccctgaagagacatttggctcagcatagtatatgcgattgcgagtggtcctgtaccgagtgccccaaagtcctccagcggcgggatagaatgcgtgatcatcttatgcacatacacaaaaaatccgatctgctcccggctgaagtggaggcaactcgaatgagacgtccatacccaactcactgccccctttgcccggttgagacatcttcttggcttgtctattttgatcacgtcaagcgtcactgtcttatttcccctggttcaaagaagtcctctaccaacggcggtcgatctcgtcgcggcaacaatggtggcgggaatggcgggaacgctaatggcaatggccatagccagagcttttcttcagccgggccaagcaattcaaacggaggctcgcagtctaaacaatcaaatattaggactgggggaatccattcgcactctgtttctgataatcggctcaacagcagccattgtcaaagcgtcattgatgccattgaacaaattcctaagggatcatctcgcgagtccagggctcacctccctggagaagacagtgcgatgcccaataacccccaaccctcacaaactcccgggttgccacgaaccgatcattcgaccaagcgcaagcgcccggacgaaaatgaagagaatctccttgattcagagaaatgcagatggtgcgatcatcacatggcaaaatgtcgacaatgccaacctgacctttgccacaagtgtggtgacctgccccggagtgctattcaaattggggcttcctcgacaacgcctgtgcaagacctcccagatacatcttctaccatcatccacttggacgaaccttactttaacgctggagcattggcaaactctgggctacctcagactatgcccacccaactgtttgacatacagttcttggacccacgatcattggacatgaccaacaccttcacgaacgatctttcccaaaacaatccgtttatcggggttgtaatggattcagaaagtcatccacctctgagtgatctcagcaacaaggtccaaaagtcgcctatttttgaaagcgataccacgttacttagcagcattggacttggcacattgattgacccgttcttcgtcagaagacagaccaagcaaccaaaagcgaaagcatccggaggtcagaatctaggcttatacaaagatcttgttctcaaaaacactccttcgcccattctggaacctcttcaactggtgtctcgttgcaaatgcgcatgtgtgaccccaactgtcgactacgaagcccacgaaagcctcaaattatcgtcgaacaagcgcatcgagatgacactaacaatgtctcgtgcgcaaaaatcgggtcatcgtctccacactcgagtgcgactcttcgtgaggctctttactatccacgcatctgcagcagcaaagtcagacacccagaagcagaggactcactctattgcacccgaaattaccgacgaggatgctgagtctgataccgattcagagcaagagctcactccctcgtcgccgtccggatccgagctcactctacgcctctaccagaccgaggacatgcaaaactggtcattcagctttgacgtcaagtgggccttgacgaaactcgcccagtggaccagcggcatagatgccgatacgtaccagaagctcctactatctgatccccgctatatactggacttgatatcgaaggatattatgtataagattttttgcttgttgatgggtcacaatgggctccttctgttctatacctcattcatacgcacgtcctgatggtcatatgctctacgattttttctggtttgccaaatatcttccatactcctcctgtctttcttttctattaattctccgcgctagatatccagatcctcctgtgcaagtctgcattcaacttccaggagatgcataatgtcctcatgtgtttaatagggggggcatactacttacatgacttttcatgaatcacgagattggacttgaaatgaaatatgattcatgcgctgtaaaagcccttctcagtctcggttttagacatctccaactataccccttttcaagaagcggtctgcgccttatcgaatgtagcgttaattaccagctttacttgcactgccaccgtcaaccgtctatacaatattgtgccgtctgccttgggtaatgcatgaaaaggacaagctccctatatgagctagggtgtaccttgcttctttttgataggagatgttttgatcgcgtgtttgatgcaggggtattgcattgcatagcagcgcatgtagcttgagcacaggtgcactagctattgcggacatgtgaaaggtcttgtatatcgaccgcgtctcaagtgacggctgagtaacgtgaaagtgacgtaagagtattacatctcactctgcgcgtactgtccgagttatgtaattatatggatgtacgagtacacgctgtctagaagacgtacatgtggaaaatggaataaaaaaaaagatatcctttgctaatacgccgttgaattaaagggaggaaagcgaatgccaaacagatccaggactagtaagatgatcctgtgagaccatcttcagtagttcggcgtttcttccattcccttctcccgatttcatcattccagctggacattaaaaagcaaccatgaaaaaatttgaaaaatcaatccctcactctgaagaaacctcaccacgcgcaaagaccatcgggtctgtagcaacagactctagggacaccacgaggccaaatgacgtgtggttcccgagcaacatgacgttgggattcttagtcttggcggctacgcttcgcgccgtgggggttccaagaacctgcgtcggcgccaccagcctggttgttggggttagggttgtagtagccctgattgaatccggggttggggccctggaaaccttgttgtcctggagattgtcagtattgaggaacggaaagaacgatcagtgtgtatgccaaaatcacttaccttgcattggcatgttgcctcccatgccaccgggcatgccgccacccatcatgggattcataccagccatcgggttcatgcccatgccacccatggggggagtcataccaggcatacccatcatcggagcaccgcccatgtttccaccacgaccgccacgcataccagcaccgccgcgcatgccacccatcatgttgccgcgattgttaaatccgtagttctgcatgccccccatcggggcgccctggaagccacccatcatggggttgggcgcggcaccttggaatccacccatgggattgaagttgttgcggttattgaagttgttgttcatgttaccgcccatgccgcggttgccgaagccgcctcggccgccgcggaatccgccagtgtggttgttcatgccgtagttggggttgccattagggttgtggacagcaccaccgccgcgaccgccggcattgcgcatcggggtatccttggggagggtcttgaagggattctggtgagggctggtgtagtgaacggtgtacttgcgcttgggggtattttgtctctcaatgttgtgcttagttgcagtcgccgcctgagccgtggtgaactcaacaaatgcttgactgtgagaacgttagtatcaatgctcggcatcgtatttgttcacaaccaagtctgtgatgttcttaccccttgctcttgccgttcaccttgtgctcgctgaaggtcacatccttcagctggccctcaactccgacctgattcgaccagcttcggacttcgtcctcagttgtccaccaggtcaattcagaaatcagcaacgcagtggtggcatcgggatccacggattgatcatcgtattccttgcgcttgattccctgggggggagcaggcagaccgtggttgagtgcgggctgctgaggtgctggctgagctccattgttgttcgccgggttcacctgctgggtctgagcgggagcaggggtctcctgcttgacggcgttggatgatccggcgccggactcgggctggttctcgggagcatccagaacaagctcggaatcctgcttgaaatctccgggctcattggcattgtaagtgccgtcgccgtagatgtcaatgtcgaagttatcgtcgtcggtagccattgcgagctagattagtatccttcggggattggatctcgaagaaattattgaaattgcctgagtatctgaggttcgatagtacaggcccttcttcttcttgatcctttccgcttctgagcaaatcaagaaaagtgcatgtctgcaggcacaagccaccaattagcattgaaaaaacaccacgaaagaaagcgcaagtagtgcaggggtatcacgatcccgtattagcttccaacagcctgttggaagtcttcacaggtaaagcgactggaaatttggccaagcccccgaagggtaacataggaaggacagacatgaaaacaaagaggccagacaatacgtacaatccgaagcgaagcgcttccggtaggcacaagacttgcgcgagctgcagacgcggtgtacagagaatgggaatcagggttgttccacgactgttggatacaaagtaataagaggaaaaggagaagagaaggatgccacagacaggcaatgaatgtagtgacggacgggggaagagaacaggagccaaagcaaaggaaggggaagaaaactcttataggggggtataaacgcgggcgccgagaaagggatttggtcaatcacgacgtcgtgggctttctcaagttcaccaaagatcttagggccgacaatgagagctggggcgatggcgatgtaatcgcgcgcggacgacgggccagaccttgggagctggaacaactattctccattctccagtccccccggagaggccaattggtcattccggagaaaccacctgttcttcttttgtcgcgacttcattcttcttcaagttctttaatctttttcaataatccttctttttcgcaatcatgtctgagactttgcaggagcttgccgatatccctaaggacttcatccgggagggttctcaattcgttcgccgctgcaccaagcgtatgtcgatcggtcatttcgcgagctcctgacacgctgacatttccaatagccgataagcgtgaattcatcaagatcagccaggctgttggcatgggtttccttgttatggtatgtgccattgtggcaacccctggatcgcatcttaaggcggaagaactgacatcgccgatagggagccattggctactttgttaagctgagtgcgtgttagattgcggatatcagtctgcatattcattgcatgtttgttgtattaacctgcttgttacagttcacattcccgtcaaccaagtgctggtcggtggcgcttaagggagaggcactcccaggagatgttcagatccatttgataattttggggagatggaaacagttgataatgggaaaagcctgcagagagaagggaggaagagcgataagaggtggtatcaggcaaaatgcccttatgaatgacaccgctctatcaaatcgactgggcactatgacctaccacgtgggactccccaaacaaccctggactacgagctttttcacactgcaaggcattgtcccttttacgttttgaattcccgtggcgatcaccatcggccacttggcgctttttttttggcgagcgataggagacagagtatgatcgctatctatgagataccaccatttttcacatcctgtatcaataggggtccttgttttacttaatatacaccctcgaggcatttattcccatctacaatatcttatactaggcttttggacggcctgggtcatatctacagtcgtggaccagatgacatgacgtattgtattcgtcaaaagagatgtgtctactcctcctgagtagatattgtgagatatattgaacacgaacacccccagggtgtgcacgaaagccaactttgaatgcttttgaaccaaaaagacatccttcacctaccatatcgtatcttcagcttcctcatcagcccatcgacgaacaggtcgactgcgcaatggacgtcggggtcgagcgtttactgcattttcgtgaaatcggttaaactcagggatatatcgtagtctgtcatcataactcttgccaagcggtggatctccctcgtctttagtagcaccggcgttccaggaatgcacagtacaagtgccagtagacaagccccagccattccaagaagttgctgaacacagcattagcaatttctactaaaacgaacgttctgggatatagttacctgctagcattggcgcacttgggtgccagcttgcatcgcggacgcaagtcctccacagcatctccccactcatctcatacgctgtagcataggcatctggatcacgcggccgcgaattgagtgtcgcttgaccaacgtcaatggtgccggctagtgtggcatccaagttgtacacataaaccttgccatcctcactcccactgtaaacatagcgtgagtttgtgcttcccggtggcgagaagtggcagcggatcaaggttttgaggactcggtggccccgatatgtaacaacagaacagtcattcttggcatttctgcggaactggtctggatattgctcgaatcggtaatcgaagccagttgtgtagtcgacagggtcgatgttttcgatatcggcggtggtcatcatcttccgcagatcccaaagcttcatcgtttggtctttgctgtttgataagacgtatcggccgtcgcctttgctgtcaacgtacgttagaccctcggtatggcccataaaggcaccggcttcacgcccatcgcccattgaccgtcggtcccaaacccgaattgtcgtgtcgtctgatccagaatacaggatatgcggtgatgatgtgtcgccgtaacacacagcattgacatgatgttgatgtcgatctcggaggtttagaactggctgtcgtgtttccagatcataaacgatgaccgagtcttctgatgtgccagcgacaacctcacgtccatctccggagaatcgaagagaccagatctatcaaaaatgcactaggttagccattgaaatgacaattaaagcatcacttcacataccccgaagtgtgaactaccccaactccgtctacttcttcggcccggtggagcagaaaagtctaaaacagtaggatctgaatcatcctctgggtctgtgctggccatatatgcctgacttcgtatcgaactgtagacaaggaaacggttgtcggggcttaacgtcgcatctgtgatagtccactggccgaatggataatcgacggttttgtagtatttccagtcgtaggggttggatgtgtcgtacatccgaaccttgaagtcttgtgcgcagcagaaaaagaaattgccatcatccgagaattggcctgaataacttcgtgtgtcatagtgaatgatcatgtccgcaatcgaacttggaatgaggccctattaggcgtcaaacgtatgcgttagccccgcagactgttttatgatacatgtgccgactaagttggcctacctgagaaatagactggttggctcttttctggactccatcagtatcaatgcctagttctcgccacattaggcttgtcgcgagagatttcttgcgctgtctgaggcggtcgacataaaattgatcagttccgaaatgaccttcgctcatcaacttcttgccctccgggttaggaaccggtggcagtttaagagtttcggcggatcgtctggctcggaggcgatttcggaacatgggcaggaaatcgtcatcgcctacaaaatcatcttcttcatcttccatctggtcttgctcttcttccatagcgcttggccaaccattggcttggaggatatgttgtaagccactggatgcaagtaactcgaataatcgggaagccggtactgtaatttgtgagaaattgtactgataccctttgagaatttccagcacaacgtactacgagtgcgcccctcattcaggttgcctgtgtcctcgctctccgaatcgtccgctgtaagttcgatttggatgttttcgaggttgatgtggttatagcctatcacagggaagcggttagtccatttgtatagtattttgaggacatatatttcagtcctaccacttgccccctccgatctcatttgctgatcattgagtgtgtcgtcctcccatgcgccatcgtcctgggatggctctagcgcggggtggtagtcgggatccagctcgtcgtcttccagccattcgtgggcaggatgccagatcccttctgggccccttggagattctctcccattatcaggtgtccttgaactcatagttgtgtgtatgcggtagtgatagatgaggagatatggtgcttatcgatacatagatgataagtcccgacctcggtcacgggcgctggctttgggttatgtcattcaccctaactccgaggctaaacgccgatgacggcttgcacttcctttgtatctcaggacttataccttctagattggtatataaatttgcctcttggtttcatgcactccagtctgtggcttgtttcgagcaagcatagtactcaatttgacctttaaaaaccaaaatgggcatattatatgcaaagaagcagaagcccatggtgactgcatctctagctttgcatatgcgtgttatacagtaatcatatgtcaacgaaagcaccatcccaaaccccttataataatactgaaggagtttagacctctccattacaagatattgaagctccctctcgatatctgaatacaaaagaaacaaatactcaaggactggcacgtaacattttgtacatcttctctataaagctacagccgtatcatcaagcaatttaaagtagtcctctaagcaagcatataagggaataacttaaggataatgctagcaatatttaccttgattatgacactagcaaggatatccatgtcagttatcctaaaaacctcatgcgcttccaactcacttccaacttacttgtcgcttctaattcactcaaattcgcttctgaagcttgtttacttccaaaccgtagtagagaactgggttgccactcaagatgtgtcatcttagcgtcgaaaagaaggcaataaatgaagtagtctgatgttaaaaaagtatgatttacatatccctttgagcagttgcctgtgctctttcctactccctactatactacaccaccctatcacagacagtcgttttcgcccttctatccccgtccccatctcagccatccctgtagggaacatatacaccaaccatatcaaccactaatgtggatggcaagaaaagaccagcccttgaggaggattcagaaaaattcaatgactaatccgaatcccaagtggacaagaaatggtaggtccatcttgcatctcccttagtgaagattcaactaatccgcctatactatagagtcctactcagattgaataccacagtaccttcgagaataaagagaacaccctcgacgcctgtgtgggaaaaatagtcagcgaggcgccatctctatgctatgatactgagcagaaagaagcgttgcgtggatatcagaagcattgcactggcataatttcttttttggatgtcttcttattaagtttaagtatacgaagaagttaggttgaaggctacagattaatagcatgaaacagcttcatagtaacagactaggtgacctctaaataggtattctgattgagaatcgcggccagcagtggacatatggagtgtgtcgctgtgtaaatagtgtgtccgtagtccttgtttttgatgattgcattgaaggcaagtaatcctttacgcccaagacttcaacacgatgttaatttcagctcccctcgacgccaatagatcagacaaattaattcaaatccagcgcccatatactcccgaaccccgtgctggatggaggactagcagctgtgttctcggtcattgacggacatcaaatacagatagcaacctaggtctatattcataggctataactatgagcgattctcagccgcccgatgccgaaagaaaagaactcttcacgcaatgccactgcggtggagtctctttcgccattgccccacccagcgagaaattcgtcgtaagcccctaagtacgagaaagtggcttgcgagtatggatatctgcgaccgtcgattggttgctggcacacgcgtcatcagctgtcatccgttgagaatattaaacaaaaaaatcagaataagcgcggcctgacatccgatgtatgtatacatgtggctgtcaagaagataagctaaaagggcggatcaattatttccccggtctccattgatagagatgcttctccaactcccgaggctcgggttccctaggatctactctgtggtgttcaggtccaaggaactaaagtgagacaagctgtctaattgaatagtccgcactcgattcctcatccaagcattctcaatataaaagcccgctcgccttccctcaaattttccctccgcacccccccaaccccaccacgatgcagtccgtcccagaatcgcgacagcagtcgttcgaggagatctacggacctcccgagaacttcctcgagatagaagtgagttacttagcgcctaatacccaatatccactcccgaatcaatcacctaccccaataccccagagtctcgtgcccatatcttcccctaatcaagcccccatacatccccacccaaaacccgcatcaacaacccccatcgggcaccaagaacgaaaaatccagactaacaacgactgcaacaggtccgcaacccccagacccatggcacatcccgcaacatgtacacgtcgtacgagattgtgtgccggaccaacatccccgccttcaaattgaaacactccgtcgtgcgccgccgttactctgatttcgagtatttccgcgatatcctcgagcgcgaaagcacgcgtgtcacgatacccccactgccagggaaggttttcaccaaccggttcagcgacgacgtcatcgagcatcgccgcgaaggtctgcagcgcttcctccagatcgtcgccggacaccctcttctgcagacggggagtaaggtgcttgctagctacatacaaggtgggtttattctagtcacttgtgcggattgttgaacgtctgctaatctcatcttgcagatcccaactgggaccgcaatgcgtggtagatgactattgcgaccattaattcattaacgagaagcatgcctcattccctaggatgggataggccttccatttagcctcctcggactccctttttcacctttatttccagctccttcccttctccttcttctcccaatcctcacttcgcactttgatatcctgtccgcggctgacacctttcgtgattgaaaatgggtaccccgcagtgtatgctatgtgatgatcattgcttgattttttatgctcgtttgatatccgaatccaccgcttctttctccccactcagatacagatacaagcaagtacaggttttatttggcttaattggacaggcgctttttcctgatttttctttttccggcaatttaccaatattgttccatatgctctcatctttcgcgatgctatctttatgcatagtgagaataccagatttgttgcatcttttgctcctcagtgtcactttgattgtcaataaattcaaatttgaaaagagaacttttactaaatagggactgtagcaaaaacaaccgtgtacatactgtgggatatagatcaacaatgaaaacagatgaggaaaaaacaagaggcgatacagtaatgctccgcagagtacccaaagcaaatcaaaatgaaatgagaaagagaagcaaaaaagccaaaattcaaatgttcataacatgcgttggcaacatagcccatccaaggcttgtcccgattaggtcaattcatcccaaatcataggagcgagggtattatcttcccacggcgtctccaccgtggaagcagcacccgccccaggtccatcatccaaagagaaagaaagcgcaccggcagcagcaggcggaagatacatcgagtgctccgaaaagctctgcggaggcggaggcaagagcgcgggatcaatctggccaagactggactgcgaaggggtagcagcgtgacgactcctcgacgccgagttgcgagaagcggtagtcgaattcggagttggagttggcgtcatggcataggccttgcttggagattgttcggtgttgacaggatgtgggcggggggtcgacgcgcctgcagccgaatcctggccctggccctggtttgggttggtaaaggcctttccattcacagagccaccatcacgataggcgtgtgggaacttggttctaaagcggtcgcggaggtctgttgctttgcggtggcttaggttcaatcgggaatcttgctggattagagtccattggaagccgtgtacggcgtagcctttgaggagggcttcgtcttcgacggctgtgaagggtcgccgagagcgacgtttagattttacgacatttgcgggaattccaagagatgcgagggttgtctgggacttgctcgcgggagcgggtgtgctatttcccgatgagggcgactgcgattgggggatgctactactcccgggatctgtgtcgggcgtggatgagacggtactcgaagtagagggtttttgtggattgggagcctggccttctgctccagagattgactcggagccttgactcgagggcattatatgggagaggtggggtttgccgggtgtttcgtcagagccctctcctttggctttgagtagggtgttagcgagagtgtcatgtagttgtttcgcagcttcattgggatcggatgtactggagtaatattagctatcctagttgacttcagaggattgaattctaattgcttaccggtacgcccatggacataatactcggaatcttcatgacgaaactttagcataataccatacagttggccaataacaagcatacctgtcttttaaatttgaggcagttcgctgattaaactccagctccggttgagcaaggatagcagtccagttgccaatcccacatttgaccacaccccgaagtaaagtagccgtttcttcttcggtccactttctcacgtttttacgggaccggccacgagttttgggagaaattggcacatcctgtccagagtgaagtggcaatgccttagtgttcttgggatcctctgctttgcgaacagccagggcaatctcatcaggatccatggggttagtactttcaacattttcatcattatcattagggtcgtcgtcttcatccacattgagagacattctgaggatatcctcgagtctagtatctcgtctttcagcagcagactgtccatctgagatcgcgacatgagcagcaactagcgtcccagggtcaacagcagcaccgcctctggagggcttagtcaaaagctgggagatattagacccagcctcaataggtggaagcaaggcggcattaggtggaggctcattcaatccattcaggatagcaaatggcccaaatggaggaggtcgctgctccttctgggcctgggggataggtaactgtagatgctcgctgaacgaatcagcctgggggtctcggcgtcgacgcttgcgaggcccttggagggcgtcgtcatcgaaggatgacgagaatggaaacttttccagggcacgaagattcacaaaagcgggaaggattggccttgggggacgttccacattcgactgcgagtctgctgacagttcggttttcctgatgcgcgcagcgttcagaaactccgtaacggtcggcaggcctgcttttgcatttgctgggatcttcccgctattgctgtttgaattggggatattattcggctcccgtgtcccactggcattgggttcgaggggcgatgggacgcttaaggttcgtgatgatactggttctcgtagaggggcgatacggagagagagttgggggagttcgcggagtattgattcatcgaggggccgcaaagcgctcgcagattccattttggtcagctctcacagaattcatctcatcctggatctgacatatcatccatctttggggggtcagatgaagctctgataagatccatgcgataacggctaggctcggggcggtgacgggcgccagtaaagtgggtccgggaggtgtctacgtcagcttccatttttgtccaattgccgagatcccctggcaagggaaacgattccctttcgaaagatatcccattggactttctttcactcattgatttgatcggattctatcatacaattgaaattctatacttgatattggtcctggtcctagaacgtgagttgtcttcctctctatggaagtagcaagtaaagctaccgggagctttgtttatgccgacgctccaagcgaattacagctaggaccaaagcacgacaattgagaagacacaagggaataacattgaacgccacaggtcctaaaaatgcccaccatctttccactatggccacacatcctctttggcgtccttgagcctatctccctgtacgaccagcccaatcctttccttgaaatgcaagaatactactgacttactatccttaatgcagggccctcggtagtgcctaccctatctacaacctccaaggctttatcgccgggcaaacccccaacatcgcagccccggccaccctgcacccaagcagcgtcgcgctcgcctaccagctcggcaatgtctactcactcctcttcctagtcggcgtgggtgtctgccatgcgacaacggaaccaagggtactccgcaactatctaatcgggctggccatcgccgacattggtcatgtctacgccacgtacttggcgatgggctgggacgcatttgcggacgttgcggcatggaacgctttgacctggggtaacatcggggtcacgatgttcttgttcgtcaataggatcgcttatttcctgggcatttttggttatgcgaaggcgccgaaggcggctgcaaagcgggactgaggtgtgacctgctcctttggttggccagaccaatatgcactcgatcattttactatatctcaaaaaagcaaagaaagttaaggcggggtctttggctttggatcgctcccctccacactccactcccttgcgtttgcgccagactgctcgtctgcgcagtttaactttagccctactctttcctgtggcggctcttcggatggaatgggtctcatctgattcgtaggttcttggccggcgcatatgggatgaacatggttgggatgtggccgggtggatatgccggtatgcttgtatttgcttgactgggttactagtggggattgtggacgagatgggctgatccgattacgttttcagctccaatgagcatccactgttaaccagctgtagatagaaccttgaatgtgggaaaaaaaagaaaattatattcatattagcataatgcaacgccggactccccggtgctgccggatgctagcatgggtatcagaatagaaatacagatcataaaatattataggaggtcgtcatctggttgtagatcacctaccccgtgggaagactgccaaggaaaccaccccatcaatgcattagctgctgaccagagaggcaagcaatcgaaacagcccaccggtcataccacctgcagccacacaagccaagcacacaccgatgtcgattgctttacttctcttgtcggacccggacccggacccgaagaggaccatagcaggccgctgatccggtggtcacatctgtgggtctattaggtgctttgcaggtagtgaaaaaccggctgaaggactgcttcgccgttttctttgtggtcgcggaggtgggggaccagccagggaatgccggggaagttctggtagtgctggcgatagacggcgaagttgtcagccgggctcatgagagagacgatttcccgtggaatcagagcctcgagcgtaatcgggtttccttggatgttgccggggcgcgatgtcaagatggtatagatgtgcaggccttttatgatagccgtgaaagagtggtaatcacgggttgctaagaggaactgttcggatgatcatacggttagagggtgacatttgggcctcggcaagtttgggagtaaggactgctcacctgtgtgcattcctgtagatatggaatcaagtctgggagtgcggcgcagcattcccagactgaaacgcttagttcgcgccactggactttcagttgttccacgatgaaatcctctgttattaggctttgctgggttaactcggcaaattggtgctcgtccaggcctctcatgctgtcggccaagtctttcggagatgtcgactggagacaatcgtctaggaaaggaagagaggtgtcaaatggggtctgccaatccatgataggagtatggatatactgtcggcgatatcggattgttaaaacagtcaacattttgagcatggcagtaagccttcctggctggtccttgaataaggcctggatagggcctgcgatgaattcgaacccagcggtgttgggctgaggcaagtcatgatttgcgccaggtcgcacagctaggaggcacttgaccaacgctcggtgtgcgaatggactgcccgaccgaagatactataaaagtcagcacaggctctatgtaatgatgagtatagctgttagaatggacgaacgtaccttttccacttcggtatacagaggaatgtcctccggatagacgcccagatgatcctggagcataatataaagagccgcatgctgctgcaggaaccattcgacgaagacagcgttatacccgagagcagcacgtacaaactcttcaaatgggatctgcctgaattgaaaatggctctcggcctcaatcgctgcagcgattgcccgcgcatctagagtagggcttgactgtggtgggagccaactccaaggcatctcctggaaaggagatatactcgaccggcgcaggatctcctccaccctctgtatatgagaaagactcccaaggagctgggactcgtagggctcggacagtgcgctcaaaaaggtttctatggtgtcgacattccgagtgcaaagcgaagaccttgggaagtttgggtcgcaaaagagtccgaactggatcacacgcttgatttcttggatgtcgaatgcccagaacaccgttgtggcttcgtcttcccaccagcgataaggaatgaaaaaggcgggaatttccaggtcgagttggaagatcgccggataagaatggccccagtccgaggcaccaattctagattgcgcagacatgttcatttccttgaatagtgaatattgcatgtccaaggtctggggaggtggtccaaagaccgattcttctgggctggtcgattgcatttatgcggtttccaacgggacagaaaagcaagaccaacacattgggcacagtacacgctggacgctcatgtaacacggcgcttgaatagagtaattacagggcagggataccctggcgagcgatgtatgccaggcgcgacgcgggagagaagggagtgagtatgggagtactcgtatgtgtacgagaaataggaaaataactaaatagcgcacagataataaacaggcgggttgctcggaaaggtgaaggtgattggttttttcactataaggccagagccgatggacttctttatccctgttactcgttccgccacgttcgacacatcacgagggttgaaaatgagggggggggaactctgggcacgttaccaacaggggcgctgatctcagttcccagctgaaaggttccttgacgggaagaatcatcgggaaaaggggggaatattgtcattgggaagtaaatagggagggggcgagttactcaattcggatcccaggaccggacctccaggggctctagatcggggataaactagtgaactccataaaaaggaatgagatctgcaagttgggcctctctgctagttaccgagattgttacatgccgaacacccgttgaccgttgggctgcagaaaggaaacgatctgggtcagttaacaatatgacaagtggatagtctcccaaaggagttgcgaagcggtcaacctacaaaggaaggaaagatttaaaccgcaaaggctaattagtcggtcaaggggggtggatacacaaagtaatcaatgtgagtacactatgggatataaatgagagaaagataatctaaaacgagcattgggccaggccctcccaatgtacaccaaatggacgctaacgtaggctaacgtagtggccgtaatcccatgtgagtggagtcttgacgatcaaagaatatttttggaattcgacaaggaatatacgaacagaacaccgaacaccttggaacgtttgcttttcatggaagtccgcgccttggtttgtccgtcaatctagggccggagtatagaccatagaagcatcacaccaagctgggcggatttccaattcaggtaatcaggaacaagtattgaactttgtgacctgaagtggcggatcttttatcattattatatcattattgccatagccttgaatagaagcgccgattaacctttcgctctcgttcaattgaaaagaagatggccttgatatcggatccttgtgagattttagcacaacatactaggtacaccgctacacactgacccctccaaggtctgacatgatagcatctgaagcccagagtattggcatatatagcattcccactgccggtggaacaatccccactagttacatcacaagcgttggttctaagcaagatagttcactaccggcaggaagtccaatgtaagaaattctacgatgggtatattctccagtccaatcagtccccaacctcaccacgtgaaatcccaagattctcagacccagttcctcggaactgggacggatctcggtagacccacgccaaagtttgtggggagtgtcttataaaatggtgatgtccctgagtttcggggttcgtgagtctatgagtttctaagtttccgagtctaacttgagatctgattgatccaaggccccatctataataattagagcatatgcagggaatgctagagcgagccactagtactaataagttctaggctcaacgttcgcatttccgagaaaccacatgactagccacatatactactccgtatagcctcctactctatgcagcatggaccgacggactctacttccgtcgcctggtatcaccaacgatatatacaagctcgcctgattgattgcacattgaacaaaagtacacatttcaagtgggtccccacttaaggagaatccacaactgcattgtcctgcatcccccagataatacattgtgcgtcttgtgtagctcagattccaaattccatgacaaatgctaacatattagccagtacagccacccagccagccacccagaatgcatcaagccaagatcccccttaccacttggttaccacctcaccttgaccatttccttgaatccacccctacaaagcccaattgatcggtctccacggtgcataaattgacgggtcaggaatccatcctacagccacatgctgtgcatatttccagctggacggcgcttggaacacggatatattatcctccgtatcctcagtggagacgatccgaacgtggcacggccgactaccaggattgagtttggatctatctgattatcctattctctcactatgataagctgccggggaaatttaacagagagaatatacttccaatgactggatgcgcgagtcatttggctatctcagcccttgctttctttccctgcgatcactcgggaggatgtggtaggtgcgtccggattgaacggaacaagcgccgattctatgaggccattgctttccctcgagccgctccaacgtaagaacagcccatccggaagagaatgggaggattcctaatccgacaccggaaatgagtgagttattcttagactctcgacccgctctcgccattccttcagagatatattcagtacaacttagggagtgtcgatatatgtatgtacctaactttctccacaaatacccctgtcaaacccaaaaaatccatgtatagatgtactaaacaaaagaccaagttctacgcacggccggtggtagggcaaatctgcgataactccacatcgctgttgcatcgcatgagctagcgccacatgcgggacacacctcgattttcatcacggagcacatagttagcacgtgcatgtcaatccccatccaagtccatgatggccctgatcgccagtactgacctttgggggtgatgctcggtctgctatcgcgcgattcgggccaataataatgcgtgagcatgcgaattgaaacaccagtcgagaagatccagacttgagttttctgatcgccatcccagtatgtaagcaatctccgcgctcgtcttacgtgtaccatgtacaccgacacgggtccgacacgggaggaccgttgcatcggataagccgaggtgcggtgatgcgctggtgctgtggattgatcgattcgggctaacggggttgcgccggagatgagtatgtaggcaatatattcctgagcgggatgatgcatgtctcagatcttcagcttgaaacggtttgggcgggttcagccgagggtttatttgtaggaaatattggtccagacgagctggattggtgcaagtaggcttctcgccgtatggcatctgcggttccgatgcattcgcatgttgactacagattacagataggaaaggaaatttacgtgtccctggatcttcatgagccatggagaaaaaaaaaaagagcagatcatccagaaataggtggaagggttgaagatccagggaataaagtaaatacggtcattaaatattcgaaagatgtaatgtcaaatggtatcatatcactcggaaacgaagcggttaacccgttcctggtttgtttgctatggttcgaacctacgagaatgcattatcaaagcccgtcaagcaagacaagacgccgtttcccagctactgtttttgtttgtttttaagctgtcagctaatccacgatatcagaagatattgtgaatttagttggcgagctcgtgggcacggcggcggtcacgctcctcagcaatggagagctagaaaagaatgttagggtaattcaaagacacacagtattagggaatataacataccttgacacccttgcccttggggagggaaacccaaggcttctcctgtccaatgacgaagacgttggactcacgggtagcgaactggttgtcaagagcatcgcgaacgtggacgatgttgaaaccaccgtcgtgacgctcacggtgagtgatgacaccaacacgacccatgttgcgaccaccagtggccatgatgacaacaccggtatcgaacttgacgaagtcaaggatcttgccagtggcaatgtcgaccttgacggtgtcgttgaccttgatggcagggtcggggtagcggatgctgtagagagcaaacgcaagttagcaaaaccatgtcctgatctaatgggatcttactgtttccattgtcctctgccgatcaaccaaagcttggtccaacgactgaatgacacggaacttgtggagtgtggaactcacgttcgcgcatcgtgcgtaaccaagaatgggatcccgcccttgccgagctgaacacgcttgaccttgcagagcttgaactcagcctcctcagcctggatgcggtggacggtgaaacggcccttggtatcgtagatgagacggaagtgctcgccggtcttctcgagggagatgacgtccatgaatccagcggggtaggtggtgtcggtgcggaccttgccgtcaaccttgaccagacgctgcatcatgatggccttgacctcgcgaccgttcagggcgtacttgagactatcagcaaagagatgttagtgattgttcgtcgcgtgccgagatattcaaggtgtcgcgtgcgtaccggttacggatgaagacaatcagaggaaggcagtcccggagcttgtgaggaccgggggaggccttgggcgcataggttccggacattttgtccaagagccagtgcgagggcgcactgaggcgcttctggtgctttccgctgcaaaagacattcttgttagtgatggtgttccatttcgagaaatttttgatcactctcgcagggactggctgaactcgtaatccggcagatagacgagaccagtgtgctgaatagtgatgtagagggcgatctcatgatacttacgggccgcgcattttgactgatttgtcgactgaaggttgggtggtcggagtgtcgaaagagaaggctcaagccgagaagtggtgatccaaatcagagaggaattcgcttagtgtgtggtgattgtgagccctattctccactccgaccaatcagactccactagtgggattttagcacttgcttatgtcatctcagttcggggccctgatccacccgtggacacgtgaatttcctctttaggaatcaagaccaatgagatctaattcatttgtacgaaaatttgtatctatttgacatgcgctgataattccacttttccgtatccaatttaaatatagcccttgataacagcaacctcagcgttgaggatggatgacccagcagctccaatgacagtgttgtgagagagggcagcgaatcggatatcaaagtgaccgcctggggcaccctcacgaactcggccaacgctcactgtgtaaccgccgcagatgttgcggtccaggcggggctggggacggtcgggctcatcgaacaccttaattgcgggctctggtgcggaaggagcacccaacttctgggcctcggacttgtactcccgcagagcctccttgacctgctcggcggttggggtctgacggtctttgaaacgcaaggaaacgaatgccatgtggccgtcagtgacaccaacacgggtgcaagtggctccgatgcgaagaccagtctgctcgtcgaagccggtggcgttggcattcaatgaacccagaatcttttgggcttcgttctcgagcttgtcctcctcgccgctgatgtaggggatgacgttgtctaggatgtccatggtgggtacaccgggatagccagctccagagacggcctgctctgtgaaaacctcgacttcctcgacagggccaaacttggcctggagagctgcgaagggaatgacgatgccaataacagcgcagttagaattgcagaccaggaagcccttcttgagaccgaagtgctcgcgctggtgaggaatcagatccagatgttgggggttcacagtgggaaccaccaaaggcaccatggggtccttgcggaagttctttgcatttgagaaaacagggatctcagccttaatgaatgccatttctgcgtgaaatgtcagtgccgggtctatttgttaaatctgatacatctgatatcacataccggtctcgccagcaacatcgctgttcagtccagagaagacaaggtcacaatccgagaaatgttcaggcttgcagtcacgcatgaccaagttgctgagtttctcagacataggagaagcctgcttccaattcacggcatccttgtacttcttgttggctgaacgctcggaagcacccacggcctgaagctcaaggaatgggtggtctgccagcagtaggatgaagcgctggcccacggagccagtggcaccgagaacacctgtaacatgttagactgaacgatgcatggaatatcttgtaaaaatttgaggccgtaccgcacttcttctttgggaatgaaggagccattttgctcttgagtttttatatgaagacggatataaatcttgcgtaagttagcaaagaaaagttccaacaagtcgaaactagcgatcaatcaaaacatatatagaagaacaagggtttcatgtcgaatcatgacctgtatgagtcaaagcgttcccagagccccgcaggcagtatatacgaggctctgccggcttcaatacctcacagaccacatggctcagagtcgcaggggattttcataataaaatcttaatatgaaacactattgtacttaccgcttaacgggtgatgtggttgaaggcttgtaacatttcactccgacagcgatatcgctctcagccaattgccttgccccgcgattagtcagcagtctacatccggacaagtgtattgctccccgattggctgagatatatgggtctttggtcaaagtttaatgtccaagggtttggcttgtttgcattctttcttcggcctgtgatatggcaaatttcttgacccctactcaacgtcttcatataagattgtatcttggtgcttgggacatattcggcatcgaatagaatgacatctttatatgctatgagtcctgggttatttcgctctctccacttgatatcgatctcatatcactataataccgattttaaagcgactttcaaagggaagtagtagtaatatgatgatgcgatgtactccgtcttgaagttcctggagcccgcctttagaggtatattcttttgtaaggtgtataatgctaagtagtaatgctaaatcacaatcaatgccctgggcccggtgtctcgtcgtcgtagtcgaagatcttgccaggattcagcagccatttcggatccaatgagcgcttgatactgcgcatgacattaattgtgtccggtccaacttcctttttcaaagatcctttcttgcccagcccaatgccgtgctcgccctgtagtaccgaattagctgatattccggtctctccgatatgaacgacttaccgtgcaagagccctccatttctagcccacgatcgaccatgtcgtacactactttctcgacccgcgccctctcggcaggatcggtgcggtcatacataatgcttgcatggaagtttccatcgccgatgtggccaaggatactggcgaaaaggcctaggtcgaccaattctttcttagagatttctggcaggggtcagtatacatgcaatgaagtcaagattgaagaggccataccaatgatatcaggaagtcgagaaatgggcacagccacatcagtcgaccagacttctgatccctccttgcgcagcgccaacatactccacagcgactgcttccgcgctgaccacaggtcatgagcttcgcggtcatcacgagcgaattcaacagactgcgcattgttattcttggcgagcttcgtcgtcagatcgatgctatccgcgacaccggcgacagttcccgagaacttgaagaacagcgtaggagagaccttccattcacggcctgttccacccgcgcgattaataacgtccatttgaacatcatccatgatctccatgcactgcacagagacacccttccgaatgacctgcatagcagtcgaggccgcatcacgaatagtcgggaacgcgacaacgccaacgcgagtctgctctgggagcggggcgagcttcaacgtagcctcagtgacgataccaagcgtaccctcagagccaacaaacatgccggtgagattgtagccggcagaagtcttgcgcggacgtctgcgtgtcttgatgatgcggccatcagccaggacgaccgtgagattgatcacccagtccttcatggtgccgtagcggacggcgttggtgccactgcagtttgtgccaaccataccgccaatcatggcagatgggcctgggtcgacagggaaaaacatgccggtatccttaatcttctcgttcagatccatccattgaatggagggctgcacgacgatgtccatgtcgtctgggtggatttccaggatcttgttcatgaaggcgaagtcgattgtcatgccgccgagcggggcggagaaattggcttctagactcgatccgcccgagtagggaatcatgggcatgcggtatttgttgcatatcttggcgatctcggagacttcttgggtggtcttagggtatgcgattgcgaccggaagacggtcagcgtttaggctagaccattctgagaagccgtgttggtggagctcgtcttgctcggtgctgattgcgtcttcgccgagctttgttcttagctcattgatggcctggagtgttgttagtttgaatggccctggactggcgcgagattacgctgttgcaactcagtgatctaccttttcaaaatcctttactgagccatattgtggcttcttggaggtctgtgccggtgtctgggtatatgaggagacgccgtagcctaaccccgcagcaaatgcggagacgagtaaagccttggcgggggtccagaagggtgagggcggagcgttcgtagatgaggaattgctctcttttgtgtgctctgttttcccagcatcggaactgtttagtctagcaccgcgagctacaatagtgcgcgagacctggggccgacaaatcgaagccggtagccctcgtgagacccggaggactggtcgcattgtggacgactagaagatattatagaattgaaccttaggagctgttgtgaaaggggaagaaagaattcgatatgcgagcatgaggtgatcagccttttgtaccttgaccttgcacctcggacttcggccgagaaaagcagttagattggtccttcataatgccataatccactataatttcactctctggccatcttctcattaccgaagatgtggagaagagccgaacgtgggggcgaataggaacaggaacggagttgcgtgcgaagtccggtgagcggtatttgccgccaaatgttctgcctgcagtataataatcgtaaagtatttatactgaatcaaaaggtgaaggaagtctaatgctccatatccattcaaatgtcctcccgagggaataatggccgaaaaaactcacaaaaaggacacgatatagacattgagcaagtaattcaaaggttttgcgctacggaacaagcaataaagtccggcggtgagacaggcggtcagtatttactatgggatcatctactccgatgattctttcttttctatagctgcacttacatacatattgtactttgcatttacggtttgatcctctttcaagagtatatgtctgtctatgtatatgtagctaataagacattgaacggagagaggtagaaaattcaaggcgccaatggttgacggggcaaccgaggggtagaacctcgtacaccaacatcaactttagaattcagatcaatcgcgtactgtccaccaaatccacgaaactaacatctatgaaaattgtgaagcaatggcagagcaactcgctcaactagtgcgcgaggtagaacgcctaatcactacgccttacgtgccttcgttacaggtaagtcggtcgagactttcattaaagtatacatgctgataatactaggatctccatgatttagtgcagcacaccaaatcttcgacaattggcacctgggcattgtgtaaacgctgccaagttggcttgttggctgatgtcctgattgaagccttatcacggtcacgcgtcgcgctgcctctgatcactgcattcggtttgtgctggcttaatggaaggcttgttggaattcgactctgacatactatagcatctacatcatcgtcttttagggatgcgctgcttgagcgacatccggtgattttggatgccttcttagaaaaggccgtggacactaatggcgatgaggtaagcttcgttcttaggagccaacaaacggtagccgaagggcgtcaactaaccagttcagtatcttccggcatgtattgcgttattctcatcgcccctgccagcgagtgttgtaccgccagctaggattgccccattcatcacgaagcttgtcagcctgatggcagcgaatttatgtgttaaaactgtagcacctcttcacgcattcatctcaggactcaaaggctcgtcaagaatcttgaatgacattccgtccgaggtcatgtccaatctccagctggagttcaccaagacactgcgcaacctcgacgatcatatgggcaacttgttgtgtctggcaacctttgcgcaaattgcgacggcactagatacaaaatctcaaaatcaacacggatcagaaacgccatggctgctgagcattaagcatttctttggccagaaacggggcctgaaaacacttgacttggtcgtattgcgtgttatactagcttgctcatccagttgtaatctgacgccgtttgaggcgactgagagtattcggctggcgatctgcatagcggacgcaattgagcctgagcagaaacaggcttggatggcaggtaataatcccaagattgctaagctgtgcgagaaggctgtcagagacgttccctatagtcaaacgcaaaccatggttagtattggctgttcccgtcgagacgaaatactaatcactcaatgataggtaattgtcttcttgcacacacttctcccggcacattcattgccatctcagctacgggaagttggcatcaaggtccttttgtccaagaatagccaacagactatggagacgatacctcatcaactgattccacgcctcgcaaagtccttagcagtaagtataggagctcctgtccgtgtacaggttttgacagctgatatcaataggaatctggggaacatgccactcgtcaacttttggccttcaccttcgatgtcttaagaggtggtaaatgcgcgggggcagagatcccaacactacacctggcaaacttggtattagctggtgtacaagaagtacataccgatatcatgctttctaatgtcaagcattccatggtccctatgagggaagtgcttagagagacggttgactactttccccgacagccaagcgaaagtcaatgcagtggtcgagcatgttgtacatccgagctatacacaaggcaaaacaggttgttcctatctctattgggactttacaacatggcatcggcccaaaatggaagcgacattatcatgaaaacattcatcagacgagtggagcaatcaatgccgagcctcgactgtgccttttcaacaacaacccccaaaaccttccgtggctctttcgccttgcgcgacagacatgagcttccgtcaactcaagtgaaccgtaattggcgctctggagttactgagctgttcatgcagaatgcccagacctctcacgacaatatgatgagaaagatcgaggatacgtgctttgacctagaacgtcgctgtcacgacgttgaaggacccctgcgagctaccgaagaagagcgggacagatatgcgagcgaaaacgagcaactgaaaaggcaaaacgaagagttcaacgagcgactcaaaagcgaaaccacagagatggaaactaagttgcggaactcacatgacagttttgttgaacttggccacgaaaacacacgccttgaacaactccttcaaggtcaatactcatataccgaggagttgactatgtcgcttaactccgcacgcgaggagcttcaatatcagcaacaaagttccgagaatgcacttcacatcgaaaaagaaaaggcccgctcaaaggaattggagatgatagctactattactggaaaggatgatcaactggaagaccttcagcaggagctgtgcagtttgcaaatgaagaatgaggagacacgccagagtctagatcaaatgtcgagcgaaaaggccactttatctcaactctctagctccctcgagcaagagcttgctagtgctagagaggcattaaagcaggccaggcttcttgttgatgagaaagaagatcaagtgaaccgcttcgtggcccaagaggaagagttgcgaaagaaattgggatctgcggaaacaactgtgagtctttctgcagtcaccaatcaatacgaattggttatactgacccttctaggttgcgcaacagaatttggaagttgagaggctatactctgaattagaagaatccgatgaaaaatcgcggagtgagattgaaaaactgaaacatgatcttgaagctggagcttctcgggccacatctgaggtatgcctacataagcgtcaaatccgtgtatatgtgaaactaatctgtgccgaatagatagcaaagcatgagacagaaaatcggcgattgcatgctgctatgcaagctgccgctcttgatgcttctagggatgtccaatcgaaagacaaacggatccaacacctggagagaaaggtaatcattaccatctttatatgcaaaatctacacactctaacgtcaaatctaggtgcaagctttacgagacgaacgtgctgccaaggcccgtgagttctcagaggcacaacaacacattggtcgattaatgggtgtaatgggcttttccgctaatgcccctgagtcaaacgcgcctgcaaaacaccagcgaactaggtcctctgtcaacgccactccagctgcaaggatccctcaacccataagcgatgatgaagatggtatacagctggcacagtcctttgaatccataacatccagctttaatggacctaccccaaaacgaccaagagggaatcgcaaatcaacaaatcagccttatgctttgaacactacaggttcaaaggcgaaaagcccgcccccggctatcgccatatctcgctctgtgagaaagccactggcagaggctgaccgcaacagcccgaccaaatcacagccaagcagtggatcgaaacgcaatcaggtggatgactctttccaggagacacaggcccaagggaaccctgaagaaaaccggcttcacgatctggacttggatatggatcttgagttttctaaagactttctcttctcaagcactgcttttactgagtcaacggatcggattgccccgtagtgagaggcttgtccgggtagcgaagttgtgtgactagccctggaggtacctatgtcttgaataattatgatatctatcgtacatgttgcctaccgatgcgttattccttagagtgtttctacgtaagcaataacctacaccacagaccataatcgcctatatggtcttagtctatttttgcaccatttagaagtctgcgttatctaccactacccaaagacaattgtttgaatttgaaacttcagggaggtctcctttgttccttattcctttctatctcggattagggtgattcatttgcttgtacccttctttttatgtgttcttcacctttgccagtattgatgtatggacatagtacactattgctttcactacctcttcagctttctaaaggtagcaaataactcattttccactagaatatcactagggcattagaaggatttgaacacgccccgtaaagtagccatgtttaactagttggactatatgttcagtgaaggtattctcagtctcatatcacttttgagaaggagaaaagagcagcaatagtctcatttgtaagtctatattaaaacatctcatcttcgcttgactgaattcaaactgaacaactggactctcaaatgccatccctgctatgtcttttatccctcattttatagtcagttctcttggctccagggccgtgacaggttaagacggtcactttttcgtataaaacttgtttccgcgcgctccagtgttctatatgaactcttaggatatcgttatttacgcgtgttaatctttcggtttccgttagtcgctcatttcattcttagtcctcctttccgtttcttatttgtcccaatccttccttccgaccttggaagggtatataacgtaccctttcttctcctcttcttcaacttcttctgcttcttcgtaacacaccctactctcttgcctgacaaccaagcgcacaatggcaggccctgatatccccgacgtgcaacccccgaggtccaacccgccagtccggggttggacgacctggagatcatggaggacctgtgcagtggacttgctgaatgtcccaagggaaatgaatacccacgacatctacgacactttcaacaagtacggcaatctgatctccattgatctctgggaggacacctcgggccggcctatttccaaggcacgcattcgtttcaagtaagcatcctgtcaatccatcatgctctttacatgctttttactgatcatctataggccacctccagatgaggatttctggagaaccggctccttcggggtgaagctacggagtggccgtgtcacagcgctagcgctgtgtgtctgctgcggtgattcgaacgggaccatccagagcccagtccgcccagatgttcagcttcccggtgaactggtgagtgcatgcatgacatgaagctatcttacaatactaatagttttttctttgaaggaactgaagaccgtacaagttgacatcggtgtcctgctaggtccatccaccatccattctatgcaaagctttaacaacctggcgtaccccagattcgttgtggatgtcatgcgcaagtgcttgtttctctacttcaaagtgggcattcgcggatcggagactgctgcagacgtcatacagcatgactatcgtgtcaaaatcacatttctccaactgtcccagatttaccaacagtacgacaaagccacgagagaacactcctttgttatcgtcctaggctccgccgccatttggcaccgaaaggccaaagagattcagtctacattgacagaaccgttgagctggagagaagaggatagttggtatcgccaaacctctgtgacacataacccgaacttgctaaagaatctccccacaaatttgaagaagacgggacatatcattgacttgggtaagtaccggtatctgttatgatattgtacgctaaccagtttttttaacaggacgatggaacgtattcaagatctcattcgcaccggatgtacatcccgatatgcgtcgtgtcgacgataccagtcactacttgatgcgcgttagagaaatcttcaaggattataacatcaacgtcaaagatggaagtcactttattgagaaagcagaccggccggtaccagtgtggcattgggttgactttttggagtccaagtctaacaaggcttccgcattgctgcaagatctaggagatcagaactatctacatcttcctttcaaggtgcggtatcaactagaggtttgcttgtcccagggatatctctctgaattcaccatgacccgcgaattcgtagagagattgaaggacctcggggatgaccaagctacaagactcttagagttcgttgcaactgagaaaaaacagtaccttgaggccatggaaatctttggtctcaaattcttcagaggagtgactgactcgaagattccgagctactgttgcttcatgcacacagcacgagtcaccccgactacaatttactacaataccccaactgtagacatctcaaatcgagtcgtccgcgaatggtctaccaaaggtgcacctgggcgctttcttcgagttcgatttacagacgaaagaaccgaaggtcgcatcaatgcttcactgagcgattccaacgatgagatctacacccgtgtcaaaaggacactggccaacggtatcactattggagaccgtcgctacgagttcctcgcatttgggaactcccaattccgcgagcatggcgcatacttctttgcaccagatgccggtatctcagcggggactatccgagcctggatgggtcaattcaaccatatccgaaatgtagccaaatacgccgcaagactagggcaatgcttttcaacaacccgagctttcaccggatcctccgttcaaactgttacatgcgatgaaattgttcgtaacgacttcacgttctcggatggtgttggaaagatttccaaattccttgcccagatggtcacatctcagcacaacattaaaaccctcacaggagaacctccttcggctttccagtttcgacttggaggggccaagggcatgcttgttatctctggagaccctctgcctcaggaggtacaccttcgaccaagtcagcaaaagttcgaaactaatcaagccggcttggagatcattcgctggtcccagtattctctcgcgactttaaatcgtcagttaattcttgtgctttctgctctgaatataccagatgaagtcttccacagtaagctcaacagcatgttgggtagcttccatcgagccatgcgcaatgattcgaaagcaattaaccttctccagaagtatgtcgacccaaaccagatgaccctcaccttggctcagatggtatctgatggcttccgacgaaatgaggagccgtttgccaataccatgctcgagctttggaagtcctggcatctgaagcatctcaaagagaaagcaaagattgccatagaccaaggagccaaccttctcggtgtcatagacgagaaaggtgttttgaagggctacttcaaaagcgcattgccgagcagaagagcctcttatgaagagagactggctgctcttcctgaaatcttcgtccagatttgccggttagatggagatggcgagtacgaagtcattgaaggtctctgcattctcgctcgaaacccttctcttcaccctggtgatattcgtgtggttcgagcagtgaaccgaccagaactgcaagcgcttcgggatgtggttgtgcttccccaaactggcgaccaggatattgcgagcatgtgctctgggggtgacctcgacggcgatgactacctcgttgtttgggaccccgatctgattcccacaaactggttcgtcgaatgcatggactacaagggttccaaagcgccagaccttgatcatgatgtgacagttgatgagatcacttcattctttgtcacctatatgaagaatgactgcctcccccgaatcgcacatgcgcacttggcttgggctgacagacttccgaggggcgtgtgggaagacaagtgcattcgtctcgcgcagcttcattccgacgcagttgactataacaagagcggtgcacatgcgagaatgacccgctctttggatcccaagttctggccccatttcatggaaaagcggttcaagagaccatccagcatttacaagtctaccaaaatcctcggtcaactgtacgatgcagtggtcactccggactttgttcccaagctagagaagcccttcgactctcgtatcctggaatccccgctggctgcagcaagtgagacctacatggaatacgcccgcgagctcaaggtggaattcgacatgaacatgcgacaaatcatggctcagtatgagatcaacaccgagtttgaggtgtggtcaacttttgtactccgccacggcttcgtgatcagagactacaagatgcaggaagacctaggtaggattgtgggtacactccgccgtggatttcgccaccagtgctatgacaaagtcggccgtcagggtggaaacattcccgccttggtcatcgccatgtatcgtgttactcaggagcaagtagccacggcgctggaggctcgacgcaaagaggcattgcagagagaggatatatccattgttgaagtgacctccaccgagctcccactcattagcttcccttggattttccccgacgtcctcggcgatgttgcgacgggccgggcgcgacaatctctagtcccagagggacaagggagcagcgattcagcaaatcctaacgatggcacaatcttcactcacaatcagatcctcaagattattgaagacatggatgaggaagtgaagctgaaggctaagaaaaacgtggagccgaaatctgaggagaataccaagccgaaggctgaggcgggctctggctccgcgccctcaaatcaagaacccattgctcgtcgacgtattgacaaatccgagcctaaccccaaccccgacgacgggaataaggaggtgtgcttcgacgaggatgatgagaaggagggaggcgtggaaatcgccgctgctgaggccggagagaagattcgaaagcaggctttgacagaggatatcgtggaaatggagggcgatgtgcagccttcagcacttgacattttgctcgacatgatgaacagctgatcgttcgctcttcgctctatgagacagaaaaaaaaaaaaaaaaaaagacggagaaaatcgaaaaaaacttacacaaaaaatgggacgcaggcgtggaattgcagaccagcgttgtaacttagttaggtgatgagctgcgagtctgcggtgcgaatgaaaccggacgctcgaatttcctccaatttttagaactaagcagcaaaataacaatagcctgtagggtatatccaggtcaaaactccaattgcttcaaagcactaccaatccaatccctcatccgccttctgttccaacaattcaacgacaggctccaacacagccttggtgtgtctccaattagcagcatctctggtcctcgagtagaagacagggcaatccaagctatcacaactaacctcatcaccaggagaaacgcccatacaagagcgacaaatagcttccagaccaacgactctcttttccgcctttcgcagccgcgaaacaacattaagcattgtaagatgcggcttctgcagacagttctcacacaccggaatagtagcattagacaatctcgaccgacaaataacacacgaagacgagcgcatataagactcaagagtcttcatgttaaccccagcagaattcgagagcgtcgatccttcaatgcgccgaatacgctgcaccttcggcatctcatcataccactgccgaacatttgcacccacaagattgaaaatcctctccagcggcggaataatgttcttcgtgatatagtactccgcatcgatctcgagatgcgcgtcatgcagaagcttctgcggcgcaacacagcggtcaataagtctcgcgccaggcgcaccggtgacaaccacgtacgggacgcgctcgccggtctgcggctcggaacgcggatcctccatcatgcgctttgtgctgatcatcgcgccggcaggcaggctgcgctcggagtacgtccccagtcggacttcgcgggcgaagcagaagtcttggatggagacgcggccttgcatgatctttgtgcattggcgctgaaagtaggattttacctgggagaggtctgcggtgcggaagagcatttttagggctttttcttcgattttttgttcggcaggtgtgccgtcgcgtcggacggtttcgatgccctttgcgtcgaattcgggctctttttgcgcccggtgctcgtatttgaagcctacgtagcgtttcttcgcgagcaggatgcacgggtgatagactttttcgaattttagtttgatcgggcgtgggttcaggtctgttactgcttcagcgatttcttcgccgatgtcgaaggcttggtcgcgtgtgcggcctttgaggtagatgaatagactatcggtgtcgccgtagacgacttccgcgccccagcgttcgattgagtggatgaaggcgatggctttttcgagggtttctcgtccggtctgtacgatgctatcggcgatctcggaacagggcattcgtccggagaatgaggcagatgtgtagccgtatgtgacgtttgcaatcagcttaagcgccagctgtctgttgttcagaagccgctgcaagaccttgtcgtctttgtctgccttcatgccgtttttgaccatcacgcgggtttcaagaatctcagaaagcatcttggccagcagcgactgacgcgcttcttgattcgcatacatcataccatttggtgcgatgttgatattgttcttcagtaactcgagcagcctgggctgtcgcttgtaatctaggaaccccatcttatctcgcccacgccagtgcattgctctgccaaggaaggttgagtagcagtagttgtacgcgatcatgacactcgggtacagtgactggaaatcaagtaccagaagtgggctagtgtagaagtcactttgtggttccatgaccaggggcaagcattctaatgcgttctgttgtccgacctgctttttgcttggtgagacgaggaggaagttctctggcttcgctattcggaacatcagagactcgactttgaactgggatccccgggaaatcacagaggcgaaatcaattcccagcaatctcgcttgctcgcttatccttgttgtcaattcatttgcctcgataatttccaaattcatttgcacacgagaggtgaaatattccactactttgaagagattgcgaggcttgccactttggtgccatcgcgtcaagtctttgggggaatagtgagggattcggcgatgcaagacatgaaagacaacgttctccatcgtgtactgtagcaggttgagctcgcttttcatggcgcgccagatgttaaatatgtgtcgcccagtgatacgaatggacgaggagtggttgaaaccccactgatctgcctctttcccaaatcgtccattggactgcgattttgtcctcgagagctcctcacatatgtcaaagtcatacttcttgcgcgctcgctcaatcacatatccccatgaagcgttgtggacctcgtagccggcgattatgtccggatcgtagtaacggacaatatctatgagtcgggttatcaggtccagttccgtgggctcacactcgacgtcaattgttaatgcctttgatattttggcttccggcctctcgccttcgccatggtaaaccatcccaacatggactcccgggagatgactattgacctcaaaatcctcgtcttcggattggatacaccagaacatgcaagtgatttcgtcctcctcggggttggccatgagtgttccgcgcgtgtttacatgcacttctaagctcattgtgctcatgtgctgagcttggtgttccacgctagtggacactgcatgctgtgagtatttgaagccatgtgcgttcttctgtgttgggccctcaatctgcgagagaaagacggatttcatcttagtaggtgtggcttgggctgcgcttagtttgaagtctttagaggcttctaactcttcaaaccactgtatgacttccgacctgcttggcgggacaggagcaaactcccagaccctggcggtacacttttctcggagttgccgatcaaccttttcttgctgatctcggtcgtgtgctgttggtatttgctcaccaaacattgcaggtgcctctgccgttgggtcgaaatttggtagatagtgaattgtgttgctccctagccgaaattctctgccgccatagtctctgggccgttcaggcacatccctttcgttcctgtaaaatgctttctggtatacaactgaaggacgcccatattcatttagtgttgaactgacttcgctagaagttgggctcgcaaatttgaagaaacgtaatgaggtgtttggtgtaaaattgaatgactgctgaatgtttttcatgttcttagcgagatgtggatctaaagagactggacccatcactgttgcagacgaatgtagctccgaagaactctgaatttcacttattccgcccgacaattccgtgccatatctagaagggagagaacttaagcgaggctggaatgactccggatcctttcttgcagaatttggctcatcttggctgtaccgcaaaatggtcgaaggatcattgggatccttgaccaccgggaatttcaggccgctagtataactatgcgcctttggacggggtgttctctgcgaggaagatgattttggttccgatgacggcgtttccgcgtaagaatccaaattgctatcaaaggagacacttttgtgtttgtcgtcttgctggtgcttccgcgtactgggtgattccaatggcccgccaggcaagccgtgtttggtcatgtgtctagctcttttggtagacgaataatggcaatcgagggtttcaaagtgttgtcttttgggtgttacactgctgctttgactctgattcctgggccgtctttcttgggctacacaatctccttccttgtagacaccatccatagttgtttctgtgttgtcagtctcagcaggctcttcgggtgcaaccaaatctgagaagcgtatttcgtcaaagacctcatcgtaaaagctctccttcagcgtgtcttctttcatttcagtctcctgtttcgttctcccttccaatgaggacccttcttgatcagaatccgagtaataccgtccgtcaggttgagatgatagagctagactctcatcaaccgaaatttccggcaccttttgctcggctgggtcctgagaacggctggtatcaaaggtcaaagtactgattttatcaggaaagaagtcctcaacactatccaacgcagtcttcacatttttggcttgggcgtcgatattcaagaatgtcccgaatgtcgtgtctttgttgtcatcatcgcgtttctcgttagcctcaagctcagacgccatctcacggaattcttcctcgtgtatccagccagctctcgactgatttcgtggatctgcagacattgaaaccaattcctcgggtccaaacggagtgcttccggggtcagtgatacccattctcttcttgcgtctgcgagtttcgtcctgccatagtccagccatgctagggacgagccgctcgctaaccgcgacaggtttcaacagctcggtgaaatcatggtgcaaaggccgttcctttacatcaagacggttcaggatatcttgaacacaaatatcaacctccagcgcgcaattgctttgtttctgtaatgcagggtgatcgagtatgctctcgggtggaactgaacgatcgtgccagcgatgggctagattgctgagctcgagatactcgggtactggagctcggaacttgacttggctacagttcatggttgcacatccgtacaagttgtagtcgcacatccattgcgggatgtattgcatatgtgcctcgtagggctgaagtgaacgtttcataacagctccctggtgcagaagatcgaccaggcgatttgtatggaaggggtttaagagataaattttgaagaaaaaccgccatcccacatggtatccgtagaacgggactcctttcaccaaggtgatgtgcgccacaaacgctgtcctccggtcatatgcatttcggcgaaagctgaccgccagagcatgatcgattgaaagatggatagatcggattgcggagtttactacagttttggtaagttaaccctcaaatcaccaatgactattactcaccatcttctggcgccaaagacccggtgtattcgatgtaaaggtatggaaatgcgccatggacatgtacgcaaactctctggcctgtctcggtggctccaaatattcgaatcacaggcaccttgggctgaaaatctgtctccgaggcttcatcacgaaaaggtagtggaggatccaactccgacgcggtcgcctggtaatgatcgatacagttgagacgcacacggaatggctccatcgctctggtgtgtggcgaccagaagccacagcaacattgcgaaggataaataaatcacgcaccgattatcgcatgtgtgtcctctttggcatctgtaggaatatgtggttgagaaaacgcgacatagatacgtccttgacaacgcgcgataacgcctagtcacgtgtttcatatcaaatccacccgccaagctcgggcctgtcgcaacttcactcatctcatctcacaacagagagagctacaggtggcttaatctacttcctcacttgctttcctttcttcccaggtccaattttacccctcctcgttgaacataccagtcatgtcacgaaaacccgcagatgtggcgtcaaaaacgcctaacgagtacattccgtccttcatctcgaaaaagccattctacgttgacgatgagacaaacaacgattacctcgaacatcaacgtcttcagaaagccattcccgatcaatcaaaatggtatgatcgaggaaagcgtgcgggtccagcagccaccaaataccgcaaaggcgcatgtgaaaactgtggcgcgatgacacacaaaaccaaagagtgtttgagtcgaccccgcaagcaaggcgccagatggacaggaaaggatattcaggcagatgaacttctccagaaggtcgacatggggtgggacgcgaaaagagatcggtggaatggctacgatgccaccgaatatcgccaggtggtcgaggaatatgaagagatggaggccatcaagcgaatggcgaaggatgattcaaagctcaagaaacttcaagccgatgaagatggcgatgaggcccccgattcagatatccggtacgccgaagaatccgacatgggacgacaacagagtaccgcaacccgaaacctacgtattcgagaagacaccgccaaatacctgctcaacctcgaccttgattccgccaaatacgacccgaagacacgccgaatggtggatatgggcgcgcaggatgaccaggccgctgcacttgtcgcagaagagaatttcgtccgtgcttcgggcgatgctgcggaattcgagaaagcccagcaatatgcgtgggagtcacaagagaagggtctgcctcaactacatatccaagccaatccgacatctggtgaagttcttcgtaagaaggagatggctgatagtgagactaagcgcgaggcgcatcgcaaagctctcctggataaatacggtggtgcagagcactcaaaaccaagtgcgctgcgagagacgatggtggttgaaaacgagcggttcattgaatatgacgagagtggtgccatcaagggtgcgcccaagaacgcaactaaatctaagtaccccgaagacgtgatggtcaacaatcatgcctccgtcttcggcagctggtggtaccaattcaaatgggggtatgcatgctgttattccacggtgaagaacagctactgtacaggggaagatggaaagaaggctttcgaggaagaaggcaacatgttaatgatggctggagcagtcgatgataatgaagaggtttccgaagacactggaaatgcggatctctctcacgagtctgagcaggccgatggcagggatgaagagcagctttcaaatcccaatggtaaaaagcggaccctggaagaattgaagtcaggtatcacagaggaggaatttgactcatacaagcggagtcggttggctgccgaggaccctatggcgaacttcatagggaaagattgattctgatgatgttctccatatactacttgcatgggcgttcggatgtactaaaatacccttgatatgctgttgaaacagtgaacaaatgcacaacgcaataatttgtgttttaaattttttttcgtatatagttctaaaacaacctcaaaataacatgcctcaatgagatatctagaatgaacatgaatcaataggatatcctatctaccactctgtaatttgttgactttcgatatgatggttatcacgtgatttgtaatgcacggaccgtctaattccaatgagggttggtcggtcacgggatccggttaagccctgataggttcacgtgattgactaacgcactcgcttagtgcacaatcgccagatcttgggcaagtttcgagacgcttagcgacgacgacccgacaaccagccccttcaacggaattgccaggtacgtccgcatactggtcccttgactagtgttcacttcaaccgcgtcaacttactaacacatatcctcatccacagttccataattcaagatgagtacgtccgatgccgactcatcgcaccgcgatcctccgcagcgtcgaataactccaaactaacaaccgccatagctaagggtacctcaagcttcggaaagcgtcacaacaagacgcacactctgtgccgtcgttgtggtacgtattacacctatttttcgcgatttcacccatccgacccgcagtcgcaaaatttctacatcgaaagacggaattagcgattacgccgaacaacacacaatctagcaaggacaagcgctaacctgtgatatttacgactacaggcaagcggtctttccacatccagaagtcgacttgtgccaactgcggctaccctgctgccaagacccgcaagtgtacgcaaatacccctcccgagaacgttgatgatatgaatggtggccattatttggaatttgggcaccaagtcgaaaactctggcttacatacattttctacgaacagtcaactggggtgagaaggctaagcgccgcaagaccaccggctccggccgcctgcgctccctccgcgatgtccaccgccgcttcttgaacggcttccagaccggtacccccaagggtgcccgtggccccgtcaccaactagattccctttttcgtccgctcggcgtcgcgttttcgttatcggagaggctggaataggaatgaggggagggatcctggcatgacgtgaattagcattacgggatagcattactcgaaatgcaatggcagttccggactcttatcgctttcccgtggagttggtggtgtgtgcaactgtcgatcacgttggttctctttgccacgtcaaggatgacaaagtaggacttgcagacgatgggaaaagtttcgttgaggggctctttcctacggaaaagagctggattaaaaaaaccccgggaaagcgtgaatgaatttcctttttcttcgtttatggctggcgaatatcccatgtcatgacagatacaatgtgaacactcttcctaccatttcatggtctgttctactcagtacgagcctctttgaggaccagacgcagagacttgaattggacatgattcaatggctgtttctgataagctcatgattctcgtgaacatctaacccatagtatacagcctcggctcatgattctccacgaccaaacacccggacaccgccatcccgttgaatgaagtacaacgcctctctctcctcgaggttctctttttcactcgtgttcagcccaccacctcggctgattctcagtacgccgctcacatcttttgcggctccagtatccaaagtgcgcagctgcatgaccgactgagcccgatgcgccagcccaataacaagtgccgcatgttccgtctccaatggtgtagccatcttcacatccgatgtggatgcattttgtattaatggggcatctgtagctaacgttaaaaccgtagcatgtgcactctgtcgaacatagtcagcctgccgtaaactttgcctatcaagtgacaagccttacctgttgtagcgctgtgatccactccgatatctctgttgctccaatccccatactcggacctgtcgcagcaaggagcaggtcaggctggtctataatgaggagaagctcatcaccatcttccattgaacttttttgctgttcaatcactgatgagatatctttctctagtgcgtccagggaggcgagaccacggccagagaattggagcttctttgcaatcccaggttcagccttcgtcgtcacatttcctctcactcctctagctgttggcaccggctgtggtgaccttccaggtacagcaccaggcggagaccgcattgggagcgttgtgcgtggacttcccagaccagccggtgagatactgggaggagtggatgtagcttgcggtgcgtaaaacagctcagacaagccatctatgaatgcaaactgttgcttatctgccagacgcgcaaggtcgaggccctataaccttggttagtgatgtcgaacaaagtatatatcaacacataatataagaagtagaacacaaatacatgttccaattcaactatcagtaaacctgttgtctgaacttaccaatcgctttgcttcggtcctccagaattcatagctccgcatgaagctcaccagcaccactttcttcttgataccattttgcggctcgtctgagccaaatgccacattgggatttggtgcgctcagcgcagcatgaaggaatctcagaaccagccagttcgaagtcgcaccaaggatagaagagaccagcgtcagagatgaatcaggcaaatttgatacatatgaggcgaggaggggcggtagtgggggttgagagggcatggttgcgcctcgatccggatatcgatgctatcctttgttcctagcgagttgaaggtgtaccgggctaaattccaatctttcctctccaattattcagtctttgtttgaaaatgttgctgctggtcaagtcgtggagatgatgtcgagaaaaaatgtctccggcttgtgattggcccctcaggtatagccatgccaagacataggatatcgagatgatattgcatagaatttaattctcgtgctgtttctcggtttaccttctcttggatatacgggtaatacatcatatagtctagtatttaactccctaaccatttactattcaaaacctctaagttagaggttctcagaatgatgcgtacaagcaatatatatagttctagctctatactacctcaacggctacacaaaacatctaaaacctcgaccgatgtagttcataggagacaaactacaaggaaaaccatatcagagttttgaaacaacataccaaaccgtcaacaagggccgtgatcagattctgaataatctctgcctgaggcaccaatatgagttttctgcaccatcacctgaccgttttccccaccatggaggggagcgatggatgcttcttatccatcgcattgcaagaggctgtgctctagcgccgatcgtgagtacattctatattctagagatcacttccccaccgctatgtgtatgcgcaccctagccctataatgcttatgtgctatactgatacccgatgtggaggtgttctcgcgaaccattttccgctcattatatcgaatgcactagctaactgttatagatgactgccgttgtatggcatcaaagcgcattggatacaagatataatatatctaacctgcctcgataaagatggctagcacgcgtgattcgcactcatttgctgtatgtattgatcggcctgcatgatagttgagataaaaagcaagggttgaagtctgactttccacatagtgcgacgaatgccgcttgcgcaagtcaagagtaagtgccttgtattaaacccctgcaggcgccggcccatttaacccgggtattatagtgctcaaaagagcggccagtttgtctgcaatgccgacagctgaacaaagaatgtgtatacagccctaaagtcagcagaagtcctctgactcggcagtacgtgaccagaaccaaaagttggtatttagacaaggctgactgactacccagacacttaacctatgttgaagatcgcctacactcatttgaaacagccttaggaaggctgttcccgggtggtgatctggatgctacacttcgttctcttttgcaaaatccggaggtcccgagggccccttcatccaagtcctcttcgaggcactcaacccccaagcatgagccagaacgggctgaaccagcaccagaagctctcccacagcaagccgatggctttgactgggctgaaaaagaaattacgcttggtgatttgacagacggcatggctgcgctgtctattaagcccgaaggagctggctactttggttagttgaatatccattatattaacttttcatttccaactgacacagatctcaggggcgtcttcaagtgttgtaccattacgagcactttttgatcatggatttgacctgaatatacccgtccgctcggcaaggtcgggaggcgtgcctctcaaagcacagcttctggaaagtgccccatccggactgatcgaacaagcgtttatcgacgctttcttcctcaactatcataccagctatccattcatccacgagcctaccttccggatgcagtttaatgacccatccctacgcccgcatggtacggcctggcatatcctcctaaacacgatcctagctcttggagcctggtgcatcggcgatgacagctcagacctcgatatcacattctaccaagaagccagaggatacttgcagcaggcgtctgtatttgagagtggaaatctgacattagtccaaggattattgttactgagcaactatgcacagaaacggaacaagccgaataccggatggaattatcttggtctggcagttcgaatggccatgagtttaggtcttcacaaggaattccctggctggaagatcagtcttctacaaagagaaatccgcagaagattgtggtggggagttttcatcttcgacagcggcgcagccaagaccttcggaagaccgatcctcctcccagaggacagtgtcatggatgcgaagcaggttcgaaatatccacgaagaggtatttggaaccaagatataacataaaaaaagtagcaataactaataattacaggccttgactcccacaacaacaactttgccggccgaatcggccggcccaaccatctactccggcttaattgcccaggccagattccaccttctcaccaatagcgtctaccaacgccttatctccagccccagcctcaccccagaagacacactaaacctgcaaaaacccatcgaagaatggtacaacggtcttccgtcttacctcaaacacccgcagttgcctatctccatgcagccagcgaatatagacccggactccctcgcactcgtgcgcaaccgcctgctatggcgaaactggaatctcacgattctgatctacagaccaatcgtacttcgctgggccgccagacgctgggccccacatagcggcagtccaggcacaccggacgcagggtccgaagaccccttcgaaacagagtgtcgattacgctgtcttcaaaatgcgcgtctgaccatctcctccatctcggagtacatggcgaactatatgtgcaccagacttggagcttggtacatgctgtatgtattcctcaaactaataccccagtcgaacgacatctaacataaaatagctacttcctcttccaagcaggcctcatccccatagtcttcctaatgaccgacccttcaaacccagaagccgccacctggctacaggacatcgaaaccacaaaatccctcctaacccacccctccctcggcacaaaccgcttcgcaagccgctgcttcgaggtcatcaaccgattgctcggcccaccaacgcactcagtgccaaacggactcccacccgacgatggccagctcgactcccagctccagcaccagcacatgtctccgcagttgcagccgaacatgatgccattccccgggcagctcttcaatgatcctgaattcggcgggagcttgtttccggtcgagcagcatatgcaaatgcctaatacgggggtcatggatttttcggaatgggtgaatttccccgcgacggaatgaatggctgtggttttgatattgatttcttttgtttgtatgtatcttgcattgtaggatgggcatatggagaaatgggaaaagacttggaaatagttatataggtatcagcgaatactccaatacatgactttgatagtgtatctaacgtggcatcctatgtcaagagtttcatctgtcagataatgggaatgtggttttttaacatgatatgtatgtaaataagtgtttatttcttttcccgggtcgttcaataaaccgacgatccttgacagggattccccgcaatatcaaactcacccacctcgggcccaccaaactcggggaaacgctttgtcccaggctcggctttccccctttcagttggagcggagtagacctctccgttgatcttcattctatcagaccatgtgcctcgatctaagctttcggagtactgtattccttcttcatctataccccagacggagtcctgtgttcctaaacagcagagggcagttcggttacttgacttggagtcatataccacgatataaagcccagcgacaattctttctcatctgttcagaaaatattgacatattatggctactactgcagatagcaccccgacgggtggctttgcgcttgtcctacagaatccctttctctgcggtgttgcatcggtaagtgtctgctcttgacatatcgctgttcattcattgaactttgcacagttctcgaccctaggtgggctgttatttggctatgaccaaggtgtcattagtggtgttatcaccatggagtcctttggagctcgatacccccgcgtcttcgcagaaagcggtttcaagggttggttcgtgtcaaccctgttgcttgcagcttgggctggttccttgatcaacggaccgatcgccgatcgagttgggcggaagatgtctattaatctggcagtggtggtctttgtcgttggttccgttattcaatgcgctgctatgagtgtcccgatgctattcgccggtcgagctattgctggcttggctgttggtcaattgaccatggttgtgccgctgtacatttctgaggtttctattccagagattcgcggtggacttgtggttctacagcaatgtaggttgttcttgaggttgggtatggctcgtcgactaatttgtgttcagtatctgtcactctcggaatcctgtttagctactggatcgactatggaacaaactacatcggtggtgctagatgcgctcctgaaatcccgtactccggtggtacaatttcaaagcctaccttcgacccatatcatgatgtccctgctggtggctgcactgggcagtccgaggcgtcgtggcgtctccccctggccctgcagattgtcccagctgtcatcctcggtgttgggatgctgttcttcccagactcgccccgttggttgttgatgaaggagcgtgatgacgactcgttgcacgcactctcaaggctgcgccgcatggatcgcgatagtcctattctccttaacgagtatcttgaaatcaaggcctctatcatgctggaaaattcctttgcgagggacaatttccctaatctctccggatacaagttgcacgttgctcaggtttgttgccaattcaccatatgaccggtttcgctgacactttcaaaagtacatgtccttcttcacagcatggtcccgcttcaggcggttggctattggttgtatcgtgatgttcttccagcagttcatgggttgcaatggtatgcatgtcccctcatcaatctatagtagtatctaattgatatagccatgatctactacgcacctacgatcttcgcccagcttggcctggatggaaacaccacctccctccttgctactggtgtttacggcatcgtcaactgtcttagtaccctccccgcgctcttcttcatcgacaaagtcggtcgtcgacccctgctcatggcaggcgctgcgggaacttgcatctcgctggtcattgtaggcggcatcctgggtggcttcggttcctcactcgtgaataataaatctgctggttgggctggtattgcctttatctacatctacgatatcaacttctcctattccttcggtgagatcatgccttgtacttttcccccgacaaccaactgacaacatcttcacatcagcccctatcggctgggttcttccttcggaaattttcaacctttcaattagatccaaggccatatccatcacaacctcggcaacatggatgtgcaacttgtaagtagcgcgatcaatcaggtattcgattcgaatctaacaactctgtcttgcagcatcattggccttgtcacgcctgatatgctcgagtctatcacctggggcacatacatcttctttgctgccttctgtcttcttgcgcttgcattcaccttcttctgcatccccgagacccgtggaaaggtatgttctgcaaccctcttttccagagcggaccgctttgtccatggaagattgacgatgctaactatttccaacagacactcgaagatatggatctcattttcggtgacacggccgctcacgaagaaaagaagcgcatcaagcgcattgaagccgagttacgcgggacaccgattgaagaagatgatatcgtcaagccggttggttcccatgtggaactggcatgaacgccaacgtcgactcaaagagaaggttacccgtacataatgatttattcgaagcaggacgtcaattgtaatacaaggaattgagataatgcgacattggcttcatggctccttcccaaactggaagttccccgtgtaaacaaagaaggcaaacaatatgaactggaaggtggcatgtgacattgatattgacagggcaggtgtgagggacctgtcgcacttgaggaaggcacgtgggtttggggtataaaaggacccttccccccatttctcttcttctcttcttcttctctcctccccatctctctggccaccatctctccgtccaccccccctcccctccccctccccttcccctcnnnnnnnnnnnnnnnnnnnnnnnnnnnnnnnnnnnnnnnnnnnnnnnnnnnnnnnnnnnnnnnnnnnnnnnnnnnnnnnnnnnnnnnnnnnnnnnnnnnnnnnnnnnnnnnnnnnnnnnnnnnnnnnnnnnnnnnnnnnnnnnnnnnnnnnnnnnnnnnnnnnnnnnnnnnctcatgctgcttaacctaccacagggatcataacattaccatgtttgttatgaggtctatgtaggtctgcatcaaataacaaaccgagctttctcgtggaagttcctgaagtcgtggctctcattgccatttgacaagtcccacggaatacatgtagatagccatagccgagttgaactcctagacttaatcctccacgtattctaatgtctcctttgtatcacagaatcttttgtgatgaggtcctcgcagatggttctaacacgacgccctcccaaacgcgtaaacaaaggtctctgtagccttgacttggtgctggccttctgttatgtctctactatctatcacatgccaaaaacaacaatgtgaatagaccttcgatgtcagccctgtggagaatggcgtcagtttggaatttctagcctattccgatctatcaccaagaccgggacttctattccaatatttgaaaaaaggaaatgttgagaatcgatcacaagatgcctctgagcgagtactggattgggtcaatgacaacggtgatatcgactctgtgcagcccatgtgaaacccatcttcactgccaaaaccaatacaacttgcgtgattatgcgcagattctccaggggaccactcacatccagatacagccaccaaagaacagctacctatcctcgagacacacgtcagctgctagaaatggtttctcaagagccatcaggtgcaaaaggcagcatctgacctgtccagcacaatgcaataaatactcgccctgctggcatcaaaccccagatcaatcttccattcttccagatatcccaaattccaagtccaaccatgccaccctcaccctccaccctcctccacatcggcatcctcctcctcgaaacaacccaactcctcgacctatccgccatagacctcctctacatgacaacccccgaatacctaaccacctgcacccccccacttcctcaatccctaatatcaatgagccgaccctgcaaaatgcactacataaccgccaacgccgcaaacccaacgcacacaacctcccaactctcaatccaaccaacctcatccctaacctcccccgccgtggcacccggaaccctagacctagtcctcatccccggcccatcgccgaaaaccatgccgccggcaaatgaatacctggactttgtgcgcgcgcatttcgaggccggcgtgctggtgttggcggtttgtacggcggcgtttgtggttgggtatgcgggtgttgcggatgggcgtagggttacggcgccgaggttgttggttcctgagatgaggaggatgtttcctggggcggactgggatgagagggttagggttgttagggatgggaatttatggacttgtggtatgttttttctttcttttttctttctttcgggttcgggttcgggtttgagttagatgtatatacatgtatgtgcatgctaatactactaggcggaatcaccaacggtcacgatctagtcatagcctacctgcgagaccattacccagccttattagtgaatacgatccttgccgctgcggatatcactccgcgtccggtggcgtatgctacttccgcgacggaggatacggataccgtctacgtggtgtggcgggttattaaggcattttcgaaagcagtggtttggttctttagtaagaagtgagtgttgaccttctagaagtgtggtagcattccaccgacgtcatcccgagtaccccgaggcttaaaatgaggatcgaggattaaggtttcttgtttcttttgggataaattaaataaaaactaaaatgtgacatctggtagtacgtagtactactattttgttgaaacgttattctacgtgtctaaagcgaggcacacagatatggttcaatagtagtgcatttcttgcagttccaaagcctaaaaaaatggagagaagaggagaacaaaaacaaacacagaccccaaggtttgcgaaaaacgaaggaagaaaaaaaaaaccaatcaatctgggcgagaacgctcgtaccatgcaacgcgctgcaccacgctaaagaggacaatcatagagaagagaagtgaagaggggaagtgaagaagagaagcgaagggaagtaaagaagaggaggaaaatatgaagcgtgcctaccctagacccagaagggaaaaaggtaagtttcatcagaataacttgagagcgatgtgctggcctagtccctgacaacccagaactataatacgagtcgagccaattaacccagatcattaagaaaaatgagacaacgtgatccactgctcttatcatgcatgacagcccggttttatcgtcgttcatgcggttcccaatggatcggttcaaagtcggaattctggaaatgggcttggttgtacggggaactaagagaaaagttagtattagtaatgaatgtggacctgaaagtgaaacttactttttgaaaggtggcgtgactggcaacgatcggctgagattcggcttcatcaccaacgggttcaggcggatctgcgggccgtctgacgttcgactgggcaatgaagtcatcggtggcggggcggaggacggtggcgccatatgtggagcaggggagacaggaaccgacgggatgggcgcgtgggttggcataggcgattgatacatgtcttgttgcggggacatgcggaatggactggcgggagttggcgagacagaaggcattggagacatgggaccacccatcccgaaagatgcgtcctgcatcaggttgggaatggccattaagctgggattgacgtcgaatccgagagcagcctggtcccaggaggagtagtcggacgtcatcccgtattggaggttgactatgggtgccatattcaaagtttcgaccgggtaaaggatatcataatggccgctgtggatgttaaacgtggtcaacacatgctgcctagagaaactcacggtcggtataggaggcggattgttgcaccactgggattatgagaggacagttggtggggtgtcacgacgtcgccttcacttcggtcgaggtaaaggatttcgactccaaatccggagccttcgattacaccgtcgatcagtgcctgcaggccaacttcgtcgatttcggtcttaaccgggtctatccgcgagctgcagtactgattgagtgacatgggtaggaaagcctggtaccggctcgggttgagcttcatccaggcactagtcaagatctgagagaatcagtttacgtcggagggaagggaatgacgcgcatcatccgagacatactcggaagtgggtaatgatagcatcagagcagtagccctcgttaaaagcctcgacgaggaaagactcgtcccgggcgccattctggatagcagcatgggtgcggttgaggacgtcctccgtagcatcgacaaagatctcgtagatagaatccgacagaccgacccgttccaaaagcgaagtaagagccttcattctctggatctcggtttcaatacggagcgtgtctctgagggtgaagagggtctcgaaataaccaaatgccacagctgtaaggattagcgaagatacacatgatatcgcatataaccatacctctccaaccacaattcccgtcgcctttcatgatccggcattcgggatgggtgatagaaagcgcctgggcaagttagacgagacatggtaacggctcaactcaagcttacattcgtctttgtagctagagtaggatccgcattcgagtaatccaaggcgatgctgtggctagactgttttattgagacaaggggaccctgtcgacacggtatcagccagggctgcagaggatagtcgaaaccaattacctggacttcgggctggtagttgttggacagcttctggaagcgctccatctcgtcggcggagagcgcattcatattggcggggtgagaggagactggatgggagaaagcagttgacagtgaaagcgctacaggcgagagaaacgacgagggaagggcgtcccggtaaaaattgacgggattctgcttttccgggaacggctggtgaataccgaaatgattccaggtaggttttgataacatcgcatacggtggagttgtgcttattcgagtcgaagagtgcgcagttatgccaatgttgtctgagggtgttagatgacagagaataaaataagagagaaaaaaaaaagtaagaaaataagatgacatacagctcgaatggacatttcctttggaagattcgggcgaaatacggcttcacacttttgcctcgtacgacagtgtgtcccagaatagcggatcggcttttactatcagagtctcagcatgacgatcagacgcaaaacatgcagagcagtcattgatgggtcgaatgtaatccacgagcacccgggggacgaataggaagatacaagaagtaagacgggacgggtcaagggaaggttgtactacaagccgctaggactcctgtgatgccaaagaagttttgtgatgaagagcccagaagcgtccgcttggaatatcaatcacatgggaaatcagagttccatgatgtcaggaggatcatgggccaagaggctataagcgaccctcttcaatgagggggtgcacgaaccacacgagtgagttttgacagggatggagctgagttgccagagcggatatggattccgggaaattataaatggaggagatggtccccagaatggaaataaggccgtgtgtatgacacacaatgacaaaagaaagagagcgatcgggggagttgcccacctttgagggtgcagatgagataatcacgggggggccacgaccgagtccgaaagatcgctggaagaacgctgaaagacggaaagagtagagaatcaacctctccaggccgagttggaggagttggaggaagaggagagatttagggggaagaagggagtttttgcggggacagaagagagagagaggaggataattggtgaatggcagttggccaaaaccaagtcggcgtggaatataaaaagaagaaaaataaaaagaagaaaagaagaaaagagagaaaacgaaaagaaaaaagaaaagaaaacaatgaagtaacatgcaccgcctacagaagagctgaacagctcgcgtaaacgccctggattttggattttaatttatgaagttgtacacaagttgtacagagttaggtatacacaaacgtatagatatagatactcgaataggaagaaacacatatccgtatatcgatatcttccctatctcaactacttcctaccctacgcctctgcacaacccttctactattgagtatcttaactatcaaatccctagtatcaccccccacttattatccacccaattgccgccggcgtcggactaatcggagctctatcattctccacggactcgcccaacgcatacataaaacagatatcaaacatataaaagaaataaaaaacccaagcgaaagggaaaaaaacgccaacaaacccgccagggtaaaagcaaaaggccccaaaagcggggtttgcgaaaatctccagggctgagagcgacggggataattcgttgggctcgtgattggtgcagcgccccgatttgatgcaacggccttttgcttttcctttctttttctcgtctcgttattttcggcgctgatggtggcattggcttttgtgttgtgttgtttttcttttttctttctatgtcatcctatcattttacccgagtcggtagttgtgttggttgtgccttgattcttgaactgcccatcacccgacctgccctcggacattctattctattctattcctaaacctatccctcaccctattccttgataggctattcgtatttctttgatgtgatttcagttcctaccggcccaggcgcagatagagctcatatgccggtagaaccaaattacatccaacgtcggacccgatctggagaatgaaagaaatcgggaactgcccgggacagaggccccatagctgatgcgcatctatcatgcaatcctataggagataaggaaatgtgttcacatgtctttggccgtacgtcgctttgcattttacctttctttgtatcggagtgttctttttccgattgtaatctcgccggttttatctgatgtatatatatttcggggcacatcctaggttgagttaaagcttcctacctacggtatactaccaagggatttagacttcaatatacaaggcagtattctacggatacctactagtactacacctaataccgaccctacatacactataaaacatacataaacataaacagttcatcttatcgtcattttagcgctgtcagaccaactctaaatagcggggctgattctcagtcctcaaccgaacaaagaaacggtgagttcttctctttctgttttccacgcggctcagccatatatgcacacgtggaaccaagggcgcttagagaccaaccgctggaaaaagcctagaacagccatttggtaggcatcttgcctcgcccgtccttgcgtgcacggggcgccgtgggtcgcataccctcgtctccaagactcgattggaaaatcgacccttgggagggttcgttcgcccgcagcccctcaccgttgagtgttgtttgccagagggtgcgcagcgcggagctccactctcccacagctcgcagccgctccacgtcactcgcactctccactaccaccgtcccattatcctggtcaatcttggcgttgagctttttgtccaggatgaggaaactgagaatgtccagcacctcgggcacggagaccttgatgtgtttggagataaattgcagcgaaaaccgcgtgtaaggcgcaatcaatttgaggaccgccttggtgcgcatgttgcggctcacctcgtcgatgttctccgcaatgaagggatcggccaggacgtcgggattcttgctcagcacgtcctcgtatgcatggatgtcgtctctttggaaggcgtccaccaggtcggtcatcgcggaaatccgggggtcattcttgtatggcttggtctcctgcgaatcgaacgggttgatgtcggacttcatcagcatggtcgtcaagacaaggtatttgagaacctggattcgttgcatagaacccgcctcgtcgtaattccggaacgactcgaaaaagtcactttgtgcctccttccagttctcttcgctcatgtgcatcttgcctccgcattcacggataatgcccatgatcttgggatgcggcacggccgaccgcactcggagagcgcgctcgtacaaggcctttagtcgtttgttattcttcgtctccgaggacatctggatctctagcgcgtaaagctcgagtaggtatgttcctttgctggtgtcgtccgacccgtcctctcgttgacacgcacggtgtaattcccgcatcttcttagccagctggccgtattgcttgcgctccagccacaggcgagctagtttaatatttgtcttcagccaaagccgctcgttgtttgtgttttggaacgattcgagggtcagcgagtagaactcctccatgcattgatacgcctctgcattatcggatcctttctcgataaagtcgagcatattgttgatcgatttctccgagtagtttcgtgtaacagcggatttgacgtatgtgagcagttcccggtagtgtgcgacggtctaaaagatggagtcagtatctgggcagctagatcagcgagatgagcttacatcgctgtatcgcccgagcttgaattccagcttgatagcctgctttagacctttgaatcccctatatcccatagttagcattgttgcgatcagcctagcagcagtaattaccagtcgcctttgtcttgttccatgggcgctatgcctaggaactcgtcgactgcctcttctggattgtcgaccttgatttgcttggcattgtagtatttgttctcgattccgatatcaccggaatcgtcgtcgtcggcgtcttcatattcaaagtcataactgtgattccggtcagctagtctggtaggtgaagtaaacaagggaccatactcctcatccgcagagtcctgcataaaatcatcatcgtcagacatcctaggcgtgtaatagtttgaaaacagcagaaggtggttaggatagagaggacaaagtggtggggttggagtgttggagaagctcggtcggataacagctgcgagcttccgccttgactatcgtgaggagagcactgacttggaattgtattcacggtgcattgactgtatgcgaacaatgtcgattcagtgtttgaataaacattgtccaaaaggtctatgctcattcaaagctaattttgaatggtttgtttcttattgttctactccatcgaatcagcctatctacggagtacctactccgtactgatggttcaagtgccaaacatacatacgcgagctattctaagcatacgaggcgtggctgataactcaggctatttacagcaaaaaggaaattaagagttccacctagatagttgtacttgttaccgtcaggggcttggtatgtgatttgtagtcctactagactctctacatgttgaaaacgaattgaatgtgagctttaacatagtaggaataggtccaagccaggaaaaaagcaagagaccctaagctgtatacaacttggtagtcttttaggtcgatcccttctagaaggtaggagtataacgctcaagatctaaaacactcaggaacatgcgcaaagaacccatacaatgtagtatgaaacagttataaaagatctagttaacagttaaatctcaaaataaaaaataaacctcggtggaccagaagggggctgatgccattcgccgatccttcagccttcagctcgatgtcattgacttagccagtcctggaatcttcccccgacaacaacctctctcttctactgtcacctaattcttccaactcctacgcgtaccacctcacacaccaaacgcacaatacgcggacgtactgtcccattaccccctcatctccttacttggagtctcctgaatcgctcggcaccatgcagctgtgcggccggcagaaggtggtccagcgcaagatggtgctgctgttagttttgatcggaatttccccgctaattattggcgactggtctgacattattccagaggcgatggtgcctgcggcaagacatcggcgctgaatgtgttcactcgtgggtgcgcaatctccccctcacccgtccccgatgatgacagcaatgctaatggactttgacaattagcttcttcccgacggtctagtaagaaatcctacttcttcggagcatactttaatgcaggttactgattctggttattgtctgtgctcagcgagcctacagtcttcggtatgcgcgcattcccccggagttgaatctcctgaacctgcagtgctaacctcggaggaatacagaaaactacgtccatggtacataataacctcactctactcctctgaccacgatcccagaaactcacatgccctagatatcttcgtcgacaacatacatgtggagctctcgctatgggataccgccggccaagaggagttcgatcgactgcgtgcgctgtcctacgaggacacacacgtgctcatgctctgcttcagcgtacgacaattccccctgtatatccccgcatataacctaacatgttccgatgactaggtcgacagccctgactccttcgagaacgtggcgtcgaagtggatcgccgagatcaacgagaactgcccgggcgtccccgtggtcctgaccgcactcaagtgcgatctacgcaaggacgaggacatgaacgacaaccccaataccatcagtttcgaccagggcctcgcgaaggcaaaggagatcggcgctgtgaaatacctgggtgagtgctcttcgatccatgtatattcgatccccggctcacattctttctagagtgctctgcggtccagaatcgcggtatcagagagagcttctacgaggctgccaaggttgctcttgctgttaacgcaggcagtggctcgtcctctggctcgtcttgtgtcattctgtgaggtgatgcattgcggtctgtttttgatacgcatggtattgctctatgtctgccatattggccttcgtttattcgctggatatctatcctgggaaggcctatttcttcgccatctgtttcttttttttctcgtttctcaccacgtttctccgtctctcccggttgggtttgttgattcccccatgcattaggtgttctgagcttgctttcgacttttttttttcttctccgggcagactatgtctgctccattcagacctcatagatatcggtctatgttgattgcatgattgcatagctctggatctccctgttccgagcatttcagcgaggtggttttttggctctcaattacgatacacaaatgtaatttttcttagattttgcagacttggtactttgttttctacagccgagctatcaaacagcatcgcacgcccaagcaacagaaacataaccctaccaacccaagcccgcatcatccaagcataggatcttaggataagccctatactagccgggtatcgttcatcaaatcctcctccgtaaccctataaacctcatcaatcccctcccccagcgaattcccagcaaaatccgcattaacccgcccaacaaacttctccacaaacgcatcagcaacatccccgatctccaatcccgaaacccccaccccctgcagactagtcgcctccctgccctccaggccacaagcgacaatctgcttaaagaaccacatcggctcatcggtaacattcagcccgacgccaaagctgctaatattgcgccgcagatgcacccccacagccgtgatcttcctcggctgctcatccgatcctgaccccgatcccggtccaggcttcacccacacgcccgggtcttccgtcgtaaacccatccaccccgtagctctttagtaggtcgatgacgctgttctctaacacacggatgtggcaccgcggcgtgaggcccagtcgcttgaggtccaggatcgtgtatgcgaccatctggcccggcccgtggtaggttgtctgtccgccgcgcagggtcgggtggtactctgcctttgcgggatgcgtgccgtgcgggatgaagagggagcggatgggttctagcggtgcggggagggagaagttggggtctgttggggagggcgggcgtgtgtttgagggtgggaggtcgcggcggccggtggtgtagacggggtttggggtgaaggtgatgattgttgggtctgggggcgggggtggcgttttggatagggtggtgcttgggttgctcagctcttgggaggatattgagcctggggaggtgagctttttgtgtgcgaggagccgggttgtgagggcttgttggaggtgcgagacgcggctgaagggcgttgtgtgggggaggtggaggtgtgcgagtctcattttggtgcttttggtggtgagatgtggtgaggttttcggtatataaggatcgggtttctcagcgcattgtaggttggagaagagtttgcgttttccacggagtacgaggccggttgttgcggagaagctgtgagctcgctccgataaggtttgataagttcacatgccaatggcctctatattctctactatttcgtatcgacagctatttgtgttgataccacttctgtgtgcctactctaactgcaagcccaagccatttgttaagctaacaattttagaccaatcagcgcaaaggtaatcatacattggcgtagaatggtctaaatctaacagccaaatggtaccatgtactcgagtttggcaagagtagtgctaatgcggtaggattcataagtccattgctatacactcatcattcatccaaacggaaattagagtccaaactatgaagatgccacgccattgaccagctcagagttttgctcagcaggaagcagagcccagtcgcgcacgccacccttccaatccgcgatgcgaccctcggtaactcttacagtaacgagtcgcacatcagtgtcaatggaaacgctaggccgtctcgcgctaggatcctgttgctgctgctgctggccgaagagattgatctcctcctcctcgaaagtattattctccaaatgacgagccttacaccacgcttcctcctccgagccgggctccaagaaccgcgcctcgcccgtaatggtagtcgagatgctggacagcgcgctagtgttcaggttgagcagcaggctggcaagggaggagcgggtagcggcgggtggtggagagccgtcacggtcaccttgcgtcggggcccgggtgggggggcgatgcgacacccagtcgtggaccagcaatgagactcgcggattggacagcaagtggtttgttttccgcgatgcggggtttgtggtcatgatgatggtggggtgggggtcgtatggggtcgaggggagataggtgtaggacatcagtgagatgtggggtgttttatcatcgcatgttgccaggtgcagcttgattgggcgatatgaggttagcttgatgggttatatgttgaacggtgttatacttacgaagcgggagttcttaaggcacgagacgacctcggatggcaacgaggtagcgacatggggatgagtggtggtggcagacgcctcataagacagcggggggttgagtgattcggccatgttagagatttgagaaccaaaaacggtaatcgtgaagttagagcctcgggagaagatcgagatctgcccaccgggcggtgtgcttaggcactgtttggccaacaacgtcatcacttcacgcctgtggatttccaacttccaggcagcttgcaggttccgctccgatttacggatattggttattctgtgcttatcattgggcacagcagagagcactaggccagtgtacacagagcagtatacaatcagtgtacaacatacactgattaggtgtgcaatagcgtggagacactagacaacgtcatagcggcagatatattggatcttattgttatatgatattacgctcgaatacaagaaaacgactgtccacagctctgtaatactcataataagtggcgatgtgcggagtacagtatgagtaggctatgtatccatgtacagatccctgcagaagtccaatagtatcgagtacatctcgccaatgtcatcattacccacatttagcgcgagatcagctgtaaaccgagccaagtggtaccaacgcccctcgtcacgattactcccctaccgaaaacttggggaagctccctccccgcacataagctgcaaccatttgaagtcaacgactcaacagcattgcgattgactcggtgattcacattgtaatcaattcgcagcaactgggacaggttaattctatagatattcagctaatattccctggctctcattactggtactggacatttccatactctccgatccgaaaggtactccgtacacatccacccgatcatcgcccccttcttcaactcctctccctgcaactccagcctgatccctgcacttacctctccactcttctatcccccctctttactttgtttctccatatctcccaccctaaacctcttctcccagctccctctatattgtacctagcttattgccaacgtcggattcattgtcgagctctcttctattgttctttccacataccatcatgttggccccacgcgcagcccgctcagcgcgatccgtgacttccctcttgcgacccttcagctcgtcagctgtggcctatcgttctccctctattcgagatattacagcccagtcgactgaggagtacctcagacggcagaaggagttccgcgagaacttagaacaggctcgtttgagaagagaaaagcaagagagtcagtctgtcaatgcttctgcttctgcttcttcccccctccgtgagtacgctcccactgctccgcaagtgagcaatgcgagcagtcaagatagtgaccgccctactttcgatgctgccacgccacttgatcacaaaggcctaggctcactctcaacgcaccgctatctaggggatgaccagcaccacgaaggtctggctaaacgtggccctttgtcctcgctcatctacggcaccaaagagggccagcattttgacaaggatatggaacgctccttctcggaggtcctagcccgcggcaaatacgttcattctatcgtgatgcacgacgtgaagcccgacaaggtcgatgaatatgtggatctggtgggccagtggtaccctcgcatggcgcgaaccgaggagaaccgtgtcaacctggtgggcagctggcggacgcaagtgggcgacaatgatacctttggtaaatcacgatcaaataagccaaccgttctgtgcgctgactctttccttgcttaattagtccacatctgggaataccaacgctacgaaggctaccacgactctcttcacagcatctcggaacacccagagttccgcgaatttgatggcaaactcaagagcctgattaagagcaagaagacttcattgatgcaggagttctcgttctggcccacgagcccgcctcgccgcctcggtggactgtttgagcttcggtcatacacactgcacccgggcaatcttctggagtgggagacacactggcgccgtggcctgaaagcccgtcgcgaagtgatggaaggtgtaggcgcatggttcgtgcaaatcggcgaattaaacacggttcaccacctgtggcagtttgccaacttagaggagcgcaagatctgccgcgagcagtcgtggagcgtccaaggctgggccgaaacggttcacaagactgttcccttgatccagaccatgaggagtcgcattcttgtccccatgccctggagccctgtcggctaaattgaaaaagctggaacgtttcctttggcctattccttggatcttggcgtccaggaatcttcattgtttgaatgagccgaattctgcgaggtgtatttcccgagattggtcctacctcatacccttatttatctaccgtcgggatgcatgtatagggaactaggccctttgcatcccatatgtgctgtgacctaggcattaagcgtcgaatccattagtcaagcatcaaacctctttcttaactatcagttagacccctttctccccgtattatttgagcacggatctcactctcagtcctgagcaaaggccctcggataaccccacttttgttcctgtcaacacttgaggcctttcattggcaacgcttgggacccttaggcagatatgttggttgaatatcgacctacgcgtcgattccgagccgacaagaaccgagggaataagtttgtagtcaaatccagcgtatatccatctcgaaactaatttaaggcctcatcacttctctccgccggcagaaaaaaaaagtcaacaaaatacccaagtggcctctttctctcttcaacgccgatctttaatatcaagcctccatagacccctgtctacggctgttcctccctaacggagacctttttttcttcctttcttcatcctctctttcttccctttgtttccattaccctttcccggcgataccttctccgatttccttcattatcacctctcggccctaaacgtgcgtctacgactctcaaaattgcctgaacagcacgtattggcaggcaccgacaactccaccaaatatatgcctcgaggtccgaaccgagtacccaaaaaatagatatccgcgcgttcaccgacgcgcaagacaaccgaaacaatggtgtacatccggcaacatgaattggcgaatctgaagaactacaaatatgctggagtcgaccactcgcctgtcagccggttgattctcaagccgttctacaacaaattcgtgattcgttgcttcccaatggggatggcgtgagtatttccctctccttacttttccccggactatgcatgcatggattatagatcctctggaggcctttttttgaataccgagacgaactatacgcaacgcaacatggaacatggctgactttattcttctttctgcgcgtctacagacccaatgccgtaagtcttgcccatgagacattgttacaattgccacgtataagaaaaatatcctaatctcgctcgcttcggtagatcaccctcaccggcttcatgtttgtggtaattaatttcgtcaccgtcatgtggtacaacccgaacttggatacggactgcccgccctgggtctatgccagttgtgcgattggcttgttcctgtaccagactttcgatgccgtagatggcatgcaggcgtatgtctacacttatcctgacagttgaggtgctttagatactgactgcgtttagacggagaaccagacagagtggcccgcttggcgaactctttgatcacagtgagttactgaatatagtacacaaaaggccaagttcatggattgctaattacttgtttctacgttactaggtgtcgatgcatgcaacaccggtctcagcgtcttggtcttcgcttcggcaatgaacatgggccagtcctggatgacctttatcgctctattcggatgtaagcccagccctgccctgcccttccacgcataaatagtctctgacaatcgtagcaacaatcaccttctatgttcagacatgggatgaatactacacgcaaatccttaccttgggcgtgatctctggccccgttgagggaatcctcacactttgcaccgtctacctattcaccgcttacatgggtggcggtagtttctggcaccagtccatgctggagaccatcggcgtgccgaagcctagcttcctctcaagccaggtgtacaacatgccgttcacgcagtggtaccttgtgtatggctccgttgtgctctgcttcgccatcggctcgagtatcatgcacgtcatgaaggtgcgtcgcgagcgaggccaggaccccttcacgccgctgtacggcctcctgcccttggtggccatctggagtcccatttttgcctacctatacctgcagccgatgattttggagaactacaccatccccttcggattgtttgtgagtctcgtcaatgcctactctgttggccgcattatcatcggccacctcactcagacgagtttcccctaccaaaacgtcctgctgtacccgctcgctctgggtgttttggacagcgcgggtgcgctgttcggcttgtggtccgcccctgtgcttgggtatggtgttgggcaggtggcattcgtgttcgggttattgggactggctgtcggtatatacggtagcttcgtggtatgtttccttcatgtttcccctccgcgcgacaatttgctgatcttgattttcttccagttcgacatcatcaccacgatatgcgactatgtcgatatctggtgcctcacgatcaagtaccccttcgtcgaggagaccgagcgcaagaccggtttgtcgaagaagaccaaataaagggatgtggcgcgattggcggcgcagtcgtgagtgtttcatgggcttgtggagaatggcaaagttcagtctctttcgccacaggcgaaacagctcaattgaggaggagtcgggtatccggattgagaagcgcgttggacaaatgatgcctggctaatgacttttccagtacatactttagtttcccttcggcacagagaagtagcttggagtggcgttatagcgatagaatatgagagttgtaatattgccgttcgtttcgagattgttgtagaagaaagtcgaagcacctgactgcctgccgcagcgagtccatgtctccactcgaaccagcgattgcgcgcgtgcttacctcagtagcttacctcatcagtctttcattggtggaaagttcgccgccttcccgaataaggacaagcgagggcacaaagcggcacaaagccctacctccacccaaaccggtccaaatcccttcagacttctcttagaagaccacctcatccgcatcacacaaggccatcgccatcagcgccatttaatcaactatctcgctgatcgactttcactcgtcaagatggtaagcccattttcgcccttttccgctcggtccctgttcgatgcgatacccacggacatggaagacccatacggattgtcgattcgaaaaattcaacgtccaccaacgctaacatgttgtcctcgataggttctcgcggtcgatctcctcaaccccaccccccaggccgaggcccgtaagcacaagcttaaggtatgaaccaaccgacccccgaaagaaacacgaaagaagaagtgaaaatatcaacccgacgaggggcgaaacctggatattcgacctggacctggacctccgatgctcaccatggagcaaatgggaaaggcaccgaacgacaggatgataatggaattcttctgggaaatggatatggaatccaatgttggatgaacaatgatggctgattattgaacttctctcgcctacagacccttgtgccctcgccccgctccttcttcatggacgtcaagtgccccggttgcttcaccatcactaccgtcttctcgcacgcccagaccgtcgtcatctgcgccggctgctcgaccgtcctctgccagcccacaggtggtaaggcccgtctgaccgagggctgctctttccgccgcaagtaaacgagaaacgaatgaaaaacttttttttcttgttatgttccggttgaaacgtcaaagagagaattagcatggagagaaattaggatgaaaataccaagacccggggttgacctcttaccttttttttgatcgtctcggcttcggttttcggtgtttcgggaagagagttgctattctggcccagttccatatactgggctttctctctttctctcttcctaccgggcttcaaaatgtcacataccaaacaacctttttttcaatatcacccttcccctaccgaaccacacggacatttttcttaactgttttttcgactggtgttgggttgtggggggatgcgattggcatatgatgtgatatggctctttttccatattatatcagtgtactggatcccctcttgaagaagacaaaatttgaatgtggccttttgggctcatttctcatcctatttccacccattgcttgttctttcttttgcatttcacggtgatgattaaaatctcagcgttgaattcttgttttctttgcgcgttatgacagatagaagatggagtgccccgaccctgtcaatgacccccacaaaagcattcaaaaaaaaagcaactagcattctgctaagggagttccggatatctggcacaaaaaggcaccttgcttgactttgtgctctgttttatgttctgattttctgctttcttgtgtttggtatattaaatgtatctgcgactactgtatatcgggttctacacctctatatcatgagttgtacctcacatggctgccaattgtagatgttatggttgtagcttacactgccagacattgtataccgttgtacggagtagttgtaccacatgatatccaatagcctctccgccgagactctaaggtgacctgtagactaaacgagagttgtaatacatacagatagtagctgtatcctccttaggatgtagttattgttgcccctcaggatgactgcgggtcccgggtgttccccaccttgcactgcgcttgtctgctttggtgtaggtttcaaagtgacgagaacgaattatactatactttgttgtcttgcctgatactctatctttttcgactatgcattttggctaaactttgtggaatctataccacctcaggaatgtatatgttatgggtgagaatccctgtcaagaatcgtctgcgaatagtttgatttcttgaaaaacgactcgggaaaagatataaacacttatttacatacatattatatcgaagaaccacagacgaaacttcatgaaattgcacttcaaggaattgacatattgccctgaagccaatgtcgctccttcctctgtgacagatgtaaataaagaaggcaaacaatgtaaactggaaggtgcgagggacggtgtcgcccttgaggaaggcaccgtttgttgagggtataaaagggtccctccccccatttctcttcttctcttctccttcttctcctccccatctctctggccaccatctcatcgtaacccccccccccccccccccccccccccgccagggccgcgagggtataaaaggacccttccccccatttctcttcttctcttcttcttctctcctccccatctctctggccaccatctctccgtccaccccccctccccttcccctccccttcccctccctccccctgagacagcgttgacagagggaaccgtagcacatgctgcttcacctaccacagggatcataacattaccattgttatgagatccatgtaggtctacatcagatatcaaacctggcgttctcgtggacgttcctgaggtcgtggctctcattgccatttgacaagtcccacggaatacatgaggggtgtaaatcttcgtagccgagttgaaatcctagacttagtctctccgcatattctaatgtcttgtttgtatcacagaatcgttcgcgctgaggtcctcgaagacggttctaacacgacacgatccatcttgcatgcgcaaccaaaggcaccctcttttcctctgtgcatattagaagagcaatactaaagcttaagagactgaacctctagtttgaaccaaggttgtatgtacatatggatatgtcatgatacgtttctgtttgtatcagaagcccctggacaagagttgccagtaatgaagagaagatagaaaatgaagaacaagtacagtaaagcccagcctagctcgtcatgatctccccatccccttgggtggatatatagaattaaataaaagactgagctttgaactcttactgaatcaaaatgagcgccttggccttgatctcggggccaaaatcaacagggttggaggggtcgccgccggtcagcatggccagctttccagtagtgtcgttgacgagtgtattagcaaacatattgcggccaccaatctcatctacagctaccttggcagcgttgtcacctgcagcgtacttgttggggtcaacagcctgcagccggttgtggctgttgcggacaaaatcgtacaagaagtagatagttgggtgccggttagggggattgcactgggggtgggcttcaaatgcactgttcaacttgttagcaacatatactactatatttctgcgtggtggggttgtagggtggggggaacatgctcaagtagagcctgcatcttggcattcatgtcttgaatattgatagtatcagacatgacggcgggttgtatatggtatttgtcagaatggaaggtagaattgagacctgaattggatgtttgctgatgtgacgaagctgtttacatttggaatttcctaaataggaccccgcactccgccttccccttccttatctcttatcggacttacatcggagaaaaaagagtccttttcttccaaggttctactctttcctcttctaatgtataaagcaaccctctgctctcagtctttaaaatccctcctactcaaacctacccaagcccacctcctagcaacaatggctcccaccaccccaaccccaacctcaccgcggaaaccgctcaaactgctgatgctccacggctacacgcagtccggcaacatcttcaacttccgaagccgcgctctggtaaaacacctccaaaagtccctgcccctctacgaagtctccgccgcatacccaacaggccctatccgcctccagcccagcgagatcccaggctacgagccctccccagaagtcaacccagacgacgagatcgaagcctacggctggtggcggcactccaccagcgcgaccccgccgctgtatgccggcatcgaagaagggttcgcgaccgtagcgcgcacactgaaagaagagggccccttcgacggcgtgatcgggttctcgcagggcgcggcgctggccgctatggtcgcttcgctgctggagcctggccggaaggagtcgttcgagcacttttctaagataagcgatgaggggggcgcgggcatggatttccctgcgtcgttcgcggaggacgggttccagcatccgccgcttaagtttgcgatttcttactgtgggtttagggcgcctggggctcggtatagggctttctatgagccggcgattcagacgcctgtgttacatgtgcttgggtctttggatgcgattgttgaggaggtgaggagtcggggtttggttgaggcttgtgccggtgatccggacaagaatgggttggttgttttccatcctggtggtcacttcttgccgagtaagcggccgtatcttgatgctgctctgacttttattcgggatgaaatggatggtaatggcatcttctcgaagaaaaatgaggccaaggaggtggaagaggatgtgaatgatatggatttgccattttgaggacagagcttgtacatatagacggagctagatttagattttttagaccatgcttacatgtagcacatatacacccctaccctaagaataaagacttgatgattggtactgtcatgagacagaaatttgctgtgtatgggtcatataaaggtcaatgctgcgacttcactactcatgggtctaccggcgaattattttacacgcggtggcagcaatccccgcgcccaagtcctccacattcatctcaacttaatgcgccttgcccatgtcactgcgagtgggctgaatacgggccatcatctcctccttggtgatcagatgatcgatccgctcgagcagacccagcagattcttcatgtcgctgctccactcgttcagaacgtcatcggcatcccggggtttggcaaagttgaccaatcgcgcgggtcggtcgatcttggcgtagatggtcttcgatgtgaccagatcactaatgtacttctccgtctcttcctcagtcagatccagaagctgggtcagacggcccatctgaatgcgagtgtagtacttggccactacacggacattgtgctcaatgacacgcttccgcaggtcttgccacctctggtttgcttggttctccgtagactgctttggctcggcgtcgaacacgtctgtgctgcatagatgggggccgaactgctcggcgaccataggccagcgcatcagctcggggatggtgaacagcttcaacaagcgggattcctcggggacttgtgacagccgtgagtcttgcttgatgcggtgcaggaggtcggattgttcattatcatagggagacaggacgacgtagtacacaatgcgggcgagtgactatagttgggttagtggcaatctaaattttgagataggtaagtttacttacggcacgcagctgctctgggttgttctcgactgcttccgtgtccaggacttcccggtagttcttgcaaacctcgagatatttgctatcgtggttggccaagataatctgctgttcgaagtaacgaagtttgagatctgtgacgtcgtcatccacctctatgggtgcctcatcaggcccacgggtcttctctcgctcctctgcctccttcttgagcgtctcgatctgctcagccgacctcttcggcttgcggttgaagtaccgcttgttgatcttgcggctgagaatctgggcctgggtccagtctccgcgctcaatgcacaaagagacctgctccagaatgaattctgtcttttcccgtctcgtcattgacccaaatgtttccacctgcaactcacacaggatgtctgctgccgaagtgagatcaccttgggtcttcttgatatttgaaagtatgcgggtaacacgggctcgctctacttcaacaaagatctttgcgataattagcatcactttggtcaagatcaatggttctcagcgtacctttccctcagtcactgtgcgcagagtttcgataacagacaacttgacctccaggctgggtgtgtcatccaggaatgtcatcaccgtctgcaccatcttcgttgtggcctgcttgagttgggcatgtttcttagataggagcagcacttggtcgttcagaaggttccagtcgccggagttcttgctgatggtgacaatggcaatcaggagtcgcgatgtagtggcaagatcggatgcctgaataagagaatcttgattagtttgggtaggggagtaatggggtggcactcggcgtcatacctgtctggattgcttctccaaacccagcagcttatcgactgctccctggacatcggtctagaaccatatacgttagcatcaactttgatatggatatcatgtccgggtgtacctttgcgagatcttctgcctccgggatgagcttgtcggcatccttggtgaagtccttctcgggcttcagcaggccggacatgatgacgaatgaggctggagggccggtgaatcaatttaaaatattaataggttagttgataggaaatttctttaagcaggtttgttgcgcttgacaacgtgagattcgcggaatgaaagaggatgatggagatgatgcttgtagctccggtgttgcgcccttacgagctggaagctccgtcccacgtgaccgaaacatcgccttccactctgtctggagtacttgcagttgtcctctcgtctagcacttgggaacatcccagctagtatattccagtctgttatggatacatatataactggtaatttaagccagagctaatgatctatatgttgttctctgatccatgtttcctgttcaacgaagttaaacatgccatagcgaccaatagaagaggctctaaaccgaattttaagaccatctaaccaaccgtcagaagcctctacagctataaataataatttcactataaatcgtataaatctacattgtacctggctgcagcgggatatgattgtgcgtggcctttggatcatggatcgtggtgatttcccaaggtcaccctatgcctactcgggctatacctaggtaggactagtgtcaaatcatatcccgaactacatccagacacatgtatgagcgactgaagagcgacagaagagcgattggattaaacaatagaataggaggtacactatcactgttttcatggagcaagagtttgcccatattgttctcaagagggggtttcgactcgttacatgcgacttgacatttatgtgcacgtcaggctacatactgcgtgagggtagccatatcacaaactgtacattagttgtatgaggaaatacgtctgaaaagacaccattctgttatccttagatttgatgtcctcaatcttattttgagccaaatgcgttagatttccaagtcctacgtcgtcaagaaagaggcatatgcagttaaagaccacgcacatctcttactcgtgtactcccactaaactactttaggtaagtctccctgcacttccccggcatttggagtcacgtggtgacaagcacgcaattgcctttaaccgttttaggcaataaagatgtatagaaatttttagaaagagttgtgcgtctgctatatatgagtcaatggtataagttcgacctcaaggacccttttctgactcttgatcacctttacaaatcctagggcttcctccaggactgtcaattgtgccaggatcatcccccacttcgataatccttatcgcccgttatcaccaatagtgacaggccttttactcagttttgatattcgtcgctttctccgcggaagtctagaaatcacttcattggtcggtctttttgttaaatacaagcttcaattctcttggaccctcggaactccagatccttccgcaattcggtctcgattacctctctcaaaccagcatacctcttactagatttattggcggggcttgacatttcgttctactgtacttcaccatgaaggacgcctcatgcgatcctagtccaaccgcgccatttatggttgcgtggaataccgactcacaagtccacttgattgtcggttcaaattctcttgccgccgctcgatgtgcgaggagcctcgaggtcggcgcaaagccgatcatcattgcgccggagaccgatgacattcatttcacactatctgaacatattgccaatggctctgcccagtgggttcgtcatggattccaagacgaggacttgacaaccctgggcagagaagaagttgatcacgttgtcgacttggtctttgtcactttgggtagcaacaacccattaagtatgacctgcttgttcaattcacaaaccactcttactcacatttcctactaggttcacacatatcgaagctctgccggcgcctcagaatcccagtgaacatatcagatgcccccgaactatgctccttcaccctactctccacctattcagacggcccccttcacattggaatcactacttccggccgggggtgcaagcttgcatccaggctgcggagggaaattgctgccttcctaccccagaatcttggaacggccatcgacagacttggtgctgtgcggagacggctgtgggaggaggacaatgccgctgggctcgtagaaaacatattcgacagagaggacgacgatagtacaggccaaaagcacaccttcaacaacttggtcacagaagacgatgctgccgccgcaaagacaagaagggtgcgctggctgtcccagatctgtgaatactggcctctccgaaagctagtatctatcaccgatgccgatatggatgccatcctgaaggcctatacatctggcaatgccaccataaatgacacaaacggcgtcgataccccctcaaagaagggaaaaatcgtcctcgcaggctctggtcccggtcacccagacctactcactcgcgctacctactacgcaatccacaatgccgacatcatcctcgcagacaagctcgtccccgcgccagtcctggacttgattcctcgccgaacggaagtccacatcgcacgcaagttccccggcaacgcagaccaagcgcaggaagaattcctcatgatgggtctagcagctttgaagcagggacggcaagtccttcgcctgaaacagggagacccatacctatatggacgcggagcagaagagttcgagtttttcaggaaggagggctattctccggtagtactaccgggaatcaccagcgccatgagcgcatccctcttcgccgatatcccagcaacccaccgcggcgtttccgaccaggttctcgtatgtacaggaaccggcagaaagggggctgctcctaaccctcccacctacgtacctactcagactgtggtcttcctcatggctcttcaccgactttctgctcttgtcgagtccctcactaccttccccgcagaagacgctggttcccagtcgcgcaaactctggcccaaggagacaccctgtgcgattgtcgaacgggcatcgtgtccagatcaacgtgttattcgctcgaccttggagcacgtatgcctggcctttgaagaggcagggtcacgaccaccggggttgctggtcgttggtgccagttgccacgtgctgcacaatccccaaggccagcgatgggtgattgaagagggcttccatggactggatgatatccgcaatgaagtggctgcgcaagtggacgccgtcgctgtgtccgtgaacgagaagcagtgattcaaaattttcttttatatatatttccgagcgacggttgcatgtacatagacagcattcagatacccctagaaacgagatatgcatgatcattgaagagtatcattatttgagaccaattagtattttgaaacacgtagattaatgttgtataaaatgtacacctattttatactacgtggaagaaaagaacagggtgaggctaaaaatagtggaaccccggcccggcgacgttgatcactccacctcattcacatcttcaattctgacaaccaccctctgccgcaaccatgtcggccaaagccccaaagccagtctatttctccaacggggaggctctccagaggtgattttctcccttttctgcgactagatacccaaatcgctgaccagtgtgcccacagccccccgctcaccgtgcgacttacccgctttgtcgagagcatttacttcttcctcggcctgtacttcactactctgttctcggtaggtacctcttacaggcgtgattatatgcgacatattgttttcaccttgcttctcgtttcagcctgcctctctttcatatcccgcaactggactaatctgacatatcctagctcgactcatacgccgctgccgagagctcctctttcaacatcaaaaaccagggaaacaagtatactactcgccctcgctggggaggtagcacaacctcattcggtggaggtggtggtggaggaggtggcggcggtggtccgggatttggtccgcggcgcgtgggacgtgtggatgatgttcgtggaccggagtgcaagagctgccaataagcgaacagtcaacgcgattgaatcgccgcttcaatatagcgtcgaggagagaaaagaagttaatggaccaagatctccggtgccagggtccttcgttttgtcgtctttttggccaggaagcttgtgatatgcgactgtaatgcacttttgatattcagcggaactttgtactatgctacaacaaccttcgaaatacatatactacgggctaatgctggtctattgaacttgatacatcaccggaacttaccgaaactgatagctcaagacaccccttagcgccacaacaccgcctcttcaaggtcacattctgtcaacgggtcgtcatgatgattatagaagcgccacgtgacagtctatgctaaccttggaagtgtagtaggagacttgaaacacatttccggagggaatccctaaacctagcatgcgacgtgctatccagcccaaggaatactacacaaaccacccagcatgagcgccatcccatcaacagacgccgaatgggcgcaaaagatagccaatatgaaggagaaactgccgaaaccctcgctgtcccagccgccaattccaacacaaatcaaccgcacaatagaccacaccctccaggtgagcccagttgaagacgcacagatcgacgcgctgtgtcaagaagcccttaaatacgaattcgccgccgtgtgcgtgcgacccgagcacgtcgcccgcgcagcaagccacgtcaaaggcagcaacacagcggtcgcatgcatagtgggcttcccggaggacgcgcacaagacagccgacaaagtacgcgacgccaaagaggccgttgcgcagggcgccaccgagctcgacatagtgatccggtacaacctgctcaaagagggccagtacacggaggtatacacggacatctatgcggtgcgtcaggctgcaccgtcgccaatcgtcctccaggcgattctggaggcgtcgacgcttgagagggatcagcttatcgatgcgacgatcgtgtcgtgtatggctggtgcagactttatcaagactagcacgggccgggatggcggtacgagtactgagcatgttaagctaatgcactatgcggcggagatgtgtaggtgctcttgcaggatcaaggctagtggcggtatacacaatgctctgactctgttacgcatgcttaaggctggagcatatcgcattggaactactgacggggttaagatcatgatggagatcgatgagggggagattcttgaacaaggatctggccatgcggtggcttgaatctttctgagtttctcggggtgcgtgtctttgacgttatcaggttaatttttttatgtttggcagtgctctatgcttccctgaatccaacagggcgacaatccttactgttctgcttgggacccaatatctctgtatgtagtatgtagttgtgaatagatcgaccccctgcgtatagacccaacgggagggaccggcgcgagaagcgggaaaggaacctagatgatatacgctcaaggattgagaccttgctaaagctcgattgccatagagatgcgcccttggtaaacaagagaagagaagcttgcagagcttctgtgagacaattgtacccacccttgcgcatcttgccatgagagccctgcaagccctgcattacccctttggggttgcctcgcgaacaccctgaccgaaaatgagaccatcccctcctaaggtatttatctcatcttgtagatgtgaaaccctgttttcagaaccagatgattattgaaacagcatacgaagtagctcgtaaaaagttggacataaggctaagctgctgcccaatgaaaagaacacacttagggttaaggctcatacattcaaagacatggatgagaaccgtttcaaggggatgcgacaaaaaatttgggtaatgaattgcactcatatgcaaagttacgaacgtggcggacatttattattgacctgaaagctcccaaatgatatagtatatactaatccaaaaccctgcgccgatccattgacatgccaatcaaaaatccaaggctttttttattcgtcgctctgatcatccgagtcactggtcacagcaccatcaatgtccatcttttgaatgactgcatcaccattgcgacccttcttctcggcagcgagccaagcttcccgtttcttcgtctcgtgttcctgcttccttgcttgccgcaggaccttctcctgttgtgcggcctcctgcttctcatgcagctcattgacataatcctgcagattggcgagctccgagcgcagctgtacaacctcatcatccgcattatggcgagcagtctcattcaccgcaaccttcttcttaagcacagacacctcgttttctagctcggcgacctgcgaatcgcgggctgctgtgtcttccagggtccccccggccggcgcggtgcttgaggcaacgcgggtaaattccgtattagcaggctggcggaatgccgcgagctctgcaagaccatcctcgatcatggagatggggaaagaggagtgagtaagcgcctgagaaaattgtgttggtttgcgggagtcagatggtgcgatgatctgcgtgtggaacatatattctgcggggacggcgccaggggcatgattcgcagccgaatggccactatcatggcgcggcttgacaatagtgtgggccttcctcttcaaatccgaagaaggatgagggatcccacccggaggcagcatgatcaagttagtgatcgggtgcgtgtagtcggcaactgatgatgtgtacttccgtcgagcgacattccaggaaagcaccttgccattcgcgtggcccgagagtaacgtggttccatcatatgtaagggagactgtcttcacggagcctgtttcagccgagggagggagccaccggtcctccatggacacctgcgcgggtgttgattgtaatgaaggatcgtgaagaggatgctgcgcagagtggctccggtagaagtctactgattgaatgctgccgtcttcatatcccacgtagaaagcccggtcgaccgggtctagagctacagatgttgcggataagggaaggaggaaggttctcagtgcacgaccggtatgatagtcccacgcgatagcagtgttgtcctttgcggttgataccacgatgttatggcggccattgctatgtcctatagccagggaggtgatacctgcgcggtggttggagaaagttcggattggcgaattcgtgggttggcgagtcgcgctgagagcgggtttcgagaacgagagaatgccaggcaaggaccagacatgtacactggcatcggcggagccggacaggataaagttggacgtggggtcgacgacgagtgaggtcactggttgcagatgtgaggccgttgtggctacttggcgtcctgtacatgtcttaaaaagctgttagacgcatggcattaggaaatgtatcaatcagatctaacatacctcccagacaatcaatcgaccaccctcggtgcccaaaaccaatacatcaccatacttgcccccggcgacagcaatgctgcgtatccgctctggaaatgggacaatgccctcttggttacccttctcccggttgtacacgtgaatgacagccttgtctgcttgggcggcaaaaatatgcgacgggctgacagctagacaattggtcaaagttgagctcttcttgaaagtcgatcgcagtatcgatgaaggttgcaattcatggacgcagacccctacatctctgagcgaggctgtcggagctttggcggatgacagcgtcgacgccacaaatgattcagaaagcatcaggaatggaagaatgaggctgtcatacgaagtatgggaggttgggttcgaagttgtccattccttccgaggttttttttttttcttaatcgattgataacgaaatgtttgcactgtttggactataatctccggacttcaaccatccacgggccggatgtgatctatcctaaccaatttggctttctaactaatgcaatctactaaagatatccccgatctttcttcatcattagacagagcgagtgttttaaatgcatctatcgactgattgtgccgtgttgtgtatgagacccaccgggagttcgatctatcattattagtcagcgtcatataggtcaaccaagctcagctgcgccggtctatcaatcaagatgattctgtttctcaggctattcagactcaaattgcgtgcccatggtgaccagttcaagccctcatcaggcatttatatccaaccctccatgaactatgctgatatgtacaataacatcggtatgaaccagattcatgcaagggattgcctaaagttgacaagaaggggtggattgccgttgcgatgagacaccagatccaatgaagacccgctttaatacaccctctggctgatcctgttgcccttctcaagggcctgattcgccatggctcccttctcccccctcttgcatctcaaatgtctcattccaagtgcccagtcggaacccagctatgacgagctgaggcagcggatggggtctctccacgttgacgggctcccgcaggacgaaagattgagatctggagccaattgttgcccatcgttgtcctggtagctcatcttctttggaatgcaaggacgacgcgacctcattcccactattattacattggcccgtgcctaacacaacccgactgcaagtgttcgtgccaggcgacggaccctctttttatgctcgaagggggaatcgttccgttgaacattttccggctttcatggcagggttgtagtcctgtcaagggatgtgcacttgagcccgatgactacccaccttaaaattagctgactagcgccacactcgctgtataaggacatatcgagcccctgcagggactgatgcccatttgttttgacttcaacaataaacaaactggattgcaatctcatctgggtcgctcttgtgcaacacgttttgctttttttcttcgacatttcggaccaggattcttacttccagccgcgaataccattgtccagtatggactctggtgcgacagacatgcctagccatgcatggtttccggcccggatccaaacgcatataagaaatcagggctccaactcgtcctcactgagccacgatacaatggcaatggccgagccaatcccgtcaccgcgtcgatggtctcccacctatacaccccgcaggcgaagcagacagatgccctcactatcatttgtaccgtcaccagtgatgccgcgcatagagtcgcatgacttttcgaactcccaagcacggcgacccacagatcgggggccaggttgcatgtcgcctttccgctcggtccgaagaatgaaagaaccatttcagttaatgcttccgacatcaccggcgtccctcgatggccctcctcccaactttcctgaaaggccaagcaggccgtacacagcggcggcagatcgcacattacgaacatggcgctcagaccaaaacctgaattgtggcaacctggagggatttggtcttctacccagcccgcctatatcagaatcacgccccgcaagcacgggtcctgaattatcttactttgatgcgcagtcctcggatggatcaggtcgatcaagtgacgggcaggataagtctggtaccactaaacaggaagtttctccaacggtcgcgacgcttgaaatcggagaaaggatacaatacacagcataccgtcccccagattggaagaaccaaccgcgaacagatgtcatgaatgttcacgaagctcactcagagttcgtacgccagtgcgagtccagcaatgaacgggagtcatacgtccagtctccgaaaaagagtgcaccttctatagcatccccaaagtcaatgcatagcgagagagtggtggttcccgggagctcgccaagaccacaaagaccccggactgggacagtctcgagtgaagctagttgggtgccgagtaacttctcatactgtgaaagatggctgcaaggtgttcccgttgacaaggtggacgatcaaaataccactacaaaggagttcaccaatcggcgcaagtgccagattgttgagaatgatcctccaatgccaaaactggacatcatcccgggagcaaaagcccttgaagaacctgtggtaagtccaacaatctcttactgtgaggtaacactgaaagctaacccccatctagagatttgttgtcgccagcaagactaaaccgaaacttgtcgacatcgctcgacaatcgtcaccatcgcctccactaattccaccgccatgcttgctgccaaacactgtaccgacgaccccagatcagcgtcaagaggaagtatccgcatttagcccggacactcctctcgatatgtctgatagtggttatgggactcgcgactctgggttttcctttgatagctatgatgatagcaaagtggatcatgacgacgacgatacgtataccgatccagggtcactgacctcttcggacagtgttggatcgactgtgatatgcgagaagcctggatccgcgcagggagagcgcgaaacaagcccacaaccggaaatcagatcaggcagcgtgagccccaatgcatcattcctaacaacgacccatttacccgggccgacgtctatcatctctggaaacgaggatgaaaagccccggatatggcaccatgactggtccatggacgatcatgaatggactttagatgagctagaacactctgtcaaggattttcctcgtcacatgctccgcctcgcatcccctgtcatggtattccttcgcaaaaacgacgagaagaccctgattaaacccttccgcactatattccccgatgtcacagagaacctaatcgactgtctctgtgctgccctcctcgctcgaaactacctcctttccctgtcaaccatccaccgaaacaagccggccatcccaccgcgcaaagatgtgtacgccatcgacggcgtcccgaaaaaagcatacaccaccctaggaattcagctaccatctgggtctgcaaccaagcctaaggacccccttttcagctctcgcagcaccgagctccagggccaactcgagcggatagtggacaacctgctattcgccatctgcggccgatcagatcctactttgaaatcggccgtcgaagttctcgcccaagtccttgaaagcactgcttaacattgatcactccttgcatctaaaatttccttgcctcttttcaacctattctctctaaaacagactgaagctcatacttcgttttgacctctccttttctctgcaattcttccctgcactcttttcctcaagactcctttcctactgactgccctcattatatcctttcatatctgtgtccctaccattactcgctctaatcattgagttctctttgtccttgtctgtccacaatttccgctctctgtccatctttctactctttctactctctttctactctcttcttctcttttttttgcttttctcatacccttgcatcgcgcggtacttggaactttgacaaattcgtgcgtttgggatcaagcattagttagtctttcagtagcatagcatagcaaccataataataattggcatcgtcatcaaccagtattccaacccctagtcgtggcaacaaagtcgcccgcacgtcttttattttcaaatgacttccaatattcctccttaacaattcgaggaaaaacaagatatcgtatttattccaagtataacgtcaaggatagaccccttcccatggatactttcccgatctgatgggcggcgaaactgcttagtaatactttcccgcgggatccattgcgcagacaaactccagttcggctttcaccggttgaacttagcatacactcacacatcatggcagctccaacaagaagtttacggcatctgtcgtctttcagaaccaccatatccccggcttcgacattaattactcccatcggccgccggagctatgctacaacggactcctcatccgccacgaatacaccaggaactacacggcggaaacctacgaagttccaggataagctgaatgcaggaccttcattttcagactttgtttcaggaggccaagatgaactccttgacccagcggaagcctacgcccttaagaccgcgcttgtcggccccgccggccgcaagaaggaaatgactcgtttgcccgaatggctgaagactcccatcccagactcaaagaatttccagcgcttaaagaaagatttgagaggattgaatctgcacaccgtctgcgaggaggcccgatgccccaacatctccgactgctggggtggcagcgacaagtcctccgccacagccacaatcatgttgatgggcgatacctgcacgcgcgggtgccgcttctgcagtgtgaagacatcccgcgcccccgctccgctcgacccgcatgaacccgaaaacaccgctgaggccatctcccgctggagcttggggtacgtggtgctgacgagtgtggaccgcgacgatctggccgacggtggcgcgcgccacttcgccgagacggttatcaaaatcaagcagaagaagccgagtatgctggtcgagtgtttgacgggtgacttccggggtgacacggagatggcgacattggtcgcgaagtctggactggacgtttatgcacacaacgttgagactgtcgaggagcttacgccctttgtccgtgaccgccgcgccacgttccagcagtctattcgtgtgcttgatgctgcgaagaaagctgttcccgatcttgtcacgaagacttcgctcatgctcggtctcggcgagaccgatgaccagctctgggatgccctccgccagctccgtgctgtcaacgtcgacgtcgtgaccttcggtcaatacatgcgccctacgaagcgccacatggctgttcatgaatacgtgactcctgatcgcttcgaaatgtggcgccagcgtgcccttgatatgggcttcttgtactgtgcctcgggccccttggtgcgaagcagttacaaggctggcgaggcgttcattgagaacgttctcaaaaagcgtcgtgctgcccctggcaccgctgagcgcactgtggataagagcgctgctatcactgacgaggctacccggtgaggtggcttgcatttgaacgaatcgattcaactactcgggaataccttttctcttgtcatctgaccacctacatgtcatttaacctcttttggcgttttctttcttgcatcttctgggttgttggtttcggggttctatagagggatgcgtcatttcaacagttcaacatttcaacacaggaattgtactttatatcaacattggaaaagtcattagtggcctatttttgtcttcctaatttcaagctatacggaaaacaacccagtgatgcttttcttatatcaaatctcaaaatgtgggcctgctccgttcctaacccactacatcccgccgccacccgccacccgccgcatataggaacagcgataaaatgcatacgctataaggtttccatactccgtactacatatgtttcatccacattggccacatgtctgctaaaggcaaggaccgacataaactccacaactctcgaacacagggaaatctccaagtccagcctggcaaccagctatgagcgccggttcaggctagacttttcgaggggtgtaatttatccaaaaaagttatatcagggcaagattcaccagcacacgtagtgtatactctactgaaaacggcgtgttgcctatttaactactcaaggacttattgcacgtcggaggtcagctccgcgatgtcctcgttgtccatgccgagcaggtagaggatatcgacaaggctctcgccgttgatgcggacgggagcttctaactggaccttggacttggcgcgccaggcgacgccgaggcctgcagtgtggagcatgaggagatcattggcgccgtcgccgacggctagggtttgcgagagggggatgccgtgctcagcggcgatggacttgagtagagagcgcttgtgctcggcgtcgacgatagggtaggacggcaccaatttgccggtcagggtttgggtggcctcgtcgatttcgagctagatgaattgtcaggtcggatgaaatagagatagtaggaaacaggagaggcttacgtggttagcaatggcaatgtcgataccgagctgctcggcgagccatgcggccaggggctggaacccgccgctcaccactgcgatcgtgaagcccagagtcttcaatgcgcggcagagctcacgggcgcccttggcgattgtcaggatagacttgagcttctcgaagacgtctgcggagacgccgttgagaagactgacgcgttccttcagtgacgcggtgaaatctagttcgccgttcatggcgcgttcagtgattgcctgcggtggtgttagtcgctggcatagagaattgaagtatgtcaagaaggacttacggaaacctccttctcgacaccaataaatttggcaatttcgtcaatgcactcattttcaatcaaggtgctatccatgtcaaacactgccaggcgcttgtgtcgacggaagacggtctccttttgcagaacaacctcgacgttccactcgcgctcaaagcgccagatgctttcatgcttgcgcagatccgggaaggaaagatagtccgggtttggcggaggagagaatgtgacctccacgacgcgggggtgttcgtcgcggtcaagacagcggtgcgaggtgttcatgcgctgatagggcgtggggagggtttccaagatctgaaggaagttggtcaggcacagctgagagacgtatggcccgtacaggtgatccagtggctccggctctagggcaggcggctcccgtgggaatttgtccatgtcttgtgtcggggcagagcctttgggcacctcgggagctgggatcttgtcgcctggactattctggggccctaaatcggggtggtagtgggggtgaatggggtggtagtgggggtgaatggggtggtttgatttgtagtagatggtcgcgacgatttgcgacgtgccggttggaagagggttttcttggtggttgaagatgctatgaatgataccgctgtcggtgaccctatccggatctggcttgattggattcgagctaagtatcagacgatcgttcacctggttagccagaacctcgccgatggtttgactgattggagtgattggtgccatcggtttgtactgctggtggtcctgcaggaatgaactgctgcgcatttggccgagggacggcctggtacgggtagaatctgccataatgtactactagtgaagcgatccggtacagagttattcgcgagtggaagctatcttgacagatcccacacttccgaagtcaaaaacgacttgcgccggatcggcacgtgggactcggtcccaccaacacacacgtgactgctgttcccctctcacgtgagctaccgcttggcagaataattgtcaatgaggtgatagaaatggaccacctccaggaataagatgagctcaattttgggtataagcaccccgtcagatccaccatgacttcaggatatgacctcagagtcagatctatctatttatggatataatatactgcccaaaatacgtactccatactccgtacatactataatcacgattctcctaactatgcggtatgcccagattattggcgattaagaaacctgctaacatgatatgattaggaagatcaaacccttggaagaatacttccagtaataggtatcatcgactgggttggtcatcgtcaattaccaatatccgggaggttacctccatggcttcccgaggtcgttggaatcaataagcaaccatctacgccattctatagaacatgggcagaaccatctccgatatcgtgggtctggccatacaacgtctcccatggcgccaccgccttcagagaatgaccctctcttccatataggaaggcggtgagatcaaaatattcgagcacgcaatcgatggcgatggcgtgcttggggtcttttcagtccccactctgtccattggccaatggcatccatggaggtttgaaatgaagaatagccgatgaagactatgttagggacggatctccggatgatgtgattgcccctgctgttcttatattctcgtctctcattgtcatctgtgactttgttcttcttactctcctacctctccgcacattcaattctattttcaaccatccattcactaccaacgtcatcacagtgccatcccatcttacattatgcccgctaagatgcccaccaactactcctctgagatggagggcattgacaaccatgataacatgactgagtctggttatgtcagtgctggttcaggttctagcgaggactatgtccccgagattgtcttcaccaagccccatcttcagttcctcaaccgccagttgcagttcctcgagccccaaggttcgtactgatatccattgacccctctttctgacgacccttcatctgactcctccttacagagatcttgagatggtgcattacctcacttcctcatctcttccagaccactgcctttggtctcacaggtctcgtcaccttggacatgttgtcgaagctggaggtgcctcgtccccagatggttgatctcatcttcctcgacactctttatcacttcgatgaaaccatggccctggtcgaccgtgtgcgtcgcaagtaccccaacaacaatgtgcacatctacaagcccgctggcgtcgacactactgccgaattcgaagccaagtacggtgccaagctctgggaagtcgacgaccaactctacgactgggtcgccaaggttgagcctgctcaacgtgcctaccgtgagatgaatgtccacgccgttctcactggtcgccgtcgcagccaaggcggcaagcgtggtgacctcgacatcatcgaagtcgacgaggccggcctcatcaagatcaacccaatggccaactggtcctttgctcaggtcaagcagtacgtgcaggagaacgatgtgccctacaacgagctccttgaccgtggttacaagagcattggtgactggcactccacccagcccgttgccgatggagaggacgagcgcgctggtcgctggaagggacagcagaagactgagtgtggtatccacaaccctcggtccaagtacgcccagtacttgatggagatggagcgcaagcgtcaagaggaggctctctcgcaggctttgcacacccagttgactcctgtttgatctgtccttttgaatccttcggctgcatacccttcggcgttctacgtgatacctctccgttttttttctccctgttctttaagcggctttatttttccccagaggcggtacaaaagtactctttgcatttacatcctccctgcacagggagttgagtttagttctcgggcccactatgggaattgtttttgagacatgataatgatattcatatgatgacagaaataaaaaatgaatatttctcattaatctttactctccatctaaatagttacatgtaatcttataatagcctcaaaatccttggatctttgatttgtgtggcggtcacgtgcggtgccaaccctagtttaccctgcatcacggtatcatttctgatccacacaagagactcaaatcttaatttcgaagagttatttatctttcaaatatctagaagattgacatgatgagataaagtagaaactatggccttcaccatcaaagcctgtgacatcgggcgaatatcgtaaagacatattaagagaaaaaaagggtgaggagtttcgaaaaccaatcaatagcacgcattctcggccatgagcctcagagttcgcggcttgacactccctcgcgcaatacgagacttgcacgtacctcgaacacggatgcaggggcttatgtaaaaccacaattcagacagctcatctcaacatatcgacaccatcatccgggagatcatacaaggccattgcatccaccaaagctcgcctcggcactgcgaagctcttccgcggtagtgacagcaacctcacacagatcagatctgacgccaattacccgacatctacgggacacagcctgcgcaaggctctcgtcagtggtgctctaagtaaacggcgcgaatggttccatattgctgcccatctggggggattatgccctgctcgtcgaacatgttgacgaatgcctctagtagcaaagggacgataattttagcctgctcgtctggtgagagaggggagattctggatcggccctcgcaatcgtcgtagttgttgtatggattcgcgaagtcggaagaatacggcttcgcctgggacgccggggagagcctttacggcgaaatggtagtggttgcgtctgccggatgcatcccgctccgggcgctggagggcattgaaactctataattgtgaggcggtagcactttccattgttgtgatgatttatggggaaaggaagggatgttttgagttttccttattacgttcaattagccttggatgatctacgggtggaaaagcttggcatcccggggacgaaatgccttaattcatacttttcttccctctttcggctatgctatcttcacgctgcaatccccgcaggactatcagaaagcccagcttcttatcagtacacttcatcgttaacaagtgcttcaaaaactggtccattggaatgacccctaaatgttcgcagctccgccggtctgggcatctcagagcttgatgattatattttacttgacaagagctagtctcagttgctaaaggctttcgtgatactatggctacaactgcatgtagcatattgaaccattcttcgacttctctcacattactctcacttacgaagaccccaccttcgactccagacgccgttaaccatatagaagaccctctccatattttcttcttccccattcaccccatcttcactggagatttccttcatccatcttccgatgttggatatggtgatctccacaattccacgagaacaaaacccaaaaagtaaggggaaaaccgacggagagaactagacaagcaaacttcgacgctgtcgcttcctcagcgacggcgacagatgagatagtgtacgacttcagcggaatgacaatcgcaaacgacgacggcgacaacgaaagaagatttgccgggtcagcgactctctcaaacgaaccgacacgtcgactttgtgcagggattacctctagtcggttaggcggtatttagaggcatgtcttatccatgaaggcaacgtgggggaaagggaatggccctattcgctctcttacggcaaatatcagcaaataggctaggaaacatttatcgttaaaccagttatggtttcgaagattgagcttatatgctttaaacttaatactggcgttttatcctagtaatcactatatctaatcggggtaatgagtttaggcctaggttacattatagggaacgacggagtgaattgaaaacacctgactgtaccggatgggatgaatcaaaattatcattacagaaaggctacggagatgtcttggaatttgcttatcccaatgtggttacaacttacattcgagtgatgtcctcaatcttgacaggggtacgtgtcaggcgctagtcctaggccaatcattgggtccgaagatgaggttagcttgaggacgtgtttgttaagtgtaagccacctactccgtcttctcatctctactatcacccccaaaatagatgtcttaagctgaagtttgtcgaaggtattgtgaaactgttgagagcccgagagaagaaacaatagcggcttcctctcctggggcaatttcacccctgaggatcagcctgagatttccaacttctcaaaaacatggaaaactgcacctacttatagttctatgtcatcttcgaaataatcaaagaggatttgagaagcgactcagtatcgaaagactgttgaaagatcagcaaggttatcagaaattccttgcattgctatcatagggccgacgccacgatgaaagggaaacttgatggcacggcgctcgatgcgatcaaacaaggccacacagagattatggggatgctaactaagaaaggcgccgtggcttgatctagcacgcgaatcaacaagccaaatcaaactgatgcatggctgtttcgtggagacgacatgagacagactgttctatccctcaagtgctgcgactatcctttccaaagccaaggtcaaaaattcatggccctgtgtaaacacaagtcgaaaccacccatccttctcagatccaaaaagaaaaccgctggccaaaaagaccttcttttgcaaaaggtgctgcataacttgttcgccaacgttctcgcactcagtttccgggtgaagctcgcggtatctctttcccaggttcatccagacgaagaacgcagcattgcatcctgtcgcatattcaattccgtggtctttcaggtagttcgctgtgtacgcataggattccgacagcagcttctgattttgttgaatataccggtcggtgaaatcgaagtcttcaagcagaagagaagtcaggtgatccgtgatcccagaagcaaaagaatagagcgatgggcccgtcatcgccatatggaaatcacggttggcctgggaaatgatgacaccgagtcggataccgttcgcgccaaaatctttgctcataccccagaggacatgaaccaaacgggggtcgataatgccagtcagatcgatggaaagggcggattcgaatttgacaggtggtggatatttgtcgacggtattctcaaagaccgaaagcgcatagatttcatcgctgacgaaatggatctggtatttctgacagagccgcatcagcttgacgagcacttctttgggatagcagcgtccaagcgggttgtgcggatgcgcaagcatcaaagccttgactttcttaccagttgttcggtgaaactccagcaatgcttcttcatacttatccacgctttcgatgctgagagggtcgtgttctccgaaactgacaggaaccacgggactacgcgaacgcagtgagatgtcggggatgaacatgccgtagtacggtcttcctagaaggatgccctcgccgggatctgcgaatgaccatgcaacatgctcgaccgcagacgagacaccgttggtggctatgacgtggctcggctcgagtggcttgactggcttcagatggcggtccaagaatgcggcgatggctgccttcaatctggaagagccagatccgccatcgttgtaggtgaggtacttggctggcagctcgagcttcttgttgatgaatttgaggagctcgtcgtgcattagtgtgttttcggctacgcccacgttgacataaccgttggggtttgttgacgcgtcccacgcgtccttcatcacgtcccacatggggttatcggatccggcatcgacgacatcttgtgcccgacgggagagaaccgattgggccattttagaggtcgcgaaagagttttcacagagatgaagtacgaggaagtacgaggccaaatgagtgagtgaagagaatgagttggaagaaattggtcgcgaggcaggtccttagatatcggttactaacggctgccgcaaatggcaagtctgggttatctccatgcggacagagatatgaactgtcatatccgaagggcgtgggcggtgacaggtaaagatatcatctagggcatttcagccttctatattgatcttcacaacaggaaggcatgaatactctagtttatttttctagaacaaccttatcaaacccattcccgaggtccaatagtttttgcctttcttgacgtcaaatgccaagcttcgacgtgaagatatcatcatccccacatcaaaagccgaacaccgaactacagtccatgaatatttcgagaaagacgacaattgacgctgatattaagattgaaatatgcatctcaaattcctaatcaagcgcagacaacacagaattcaagcccattctatctgttagcattgattgcccagcacgacgctctagcccccgtacagcaaacccctcgaaacccaaggagtattgctcaatcagaagtatgtatcacacgtcttcaaaattttaaagtaacctccacagcacagttgagcacgacatactgaggcgtcaaattcacgccactggagtgacggtaggcaggcatctgcggatacaccgaaggatccaagggctcagattcaatttccctaatattcacgatatgcataggtgtaacatgcccacagggaacagctctcgcatactgatttaccttcgtgacagcatcgcacacagcctccttgcacgacttgacaccgatctcacgcctggtagcatcggtgaggtaccagctgatattgttcaatctagcgttggaatagcaatccagctcatcaacaaacatgcgcagctcgtcgaagtcaaggaatatagggttggtcttgacggtggcgcacacgtgggatttatcaatattgtttctttcaggccgttgaaggtcttggtgacttctttcgagaccgttgcttctgactcgcctgttgattatatggtcaggtggactgtggctcgctctgggaagcgacgtgcggtggaacgacctcgtagagtgatatggaggggcatggtcggtttgggatcaggaaccaaagtggacgatgatgaagatgatagaattaggaatttgggggtttaaatggccctcgggataccagacggtggaaaaaacattggggacttttatacagtctcaaaagtttgaattgattcttctcgaatacaaaccaattcttatcaatttacttagctttcaatgtcaaatgctaactataatcaagaccactcaaccaagcaattgctcctgcttagcgccctcaacagcaacgagataagccggacgatccttgacatagaactcgacgtcaacctttcccttaaaattagcctctccaccgtctagggtcccagccttgatgcaagtcatatcgggcatgatctctagttctgtgtagagactcgagccgcaggttgggcagaaaaagtgcttgttgatctttccactggttccgatcccatcgtaggaattgggggtacctatgcagaaagaaatgtggagtcagcaactgacaagcggattgtgggtgtgattgtgatcgcggtgcgaggtgtagatgtagttaccctttgtcactttgaagctggcgcggggaaccactgcgttggaggtaaatgcaccgccagaccactatttggtattagatgttatggtcaacgcccatcggcatatatgtataagtcttgggtttcaccttctggcagtcggtgcagtggcacagggcggacacatacgtgtcggctaggatgttgttagctttggatgtggtttcgatcaattgatataccttcaacggtgtaagcaatactgccgcacatgcagcttccagttaaagtcatgttggatgcaggatatacttagtatgcgtgacgaaacaccttggtggaatcgaagtgcaaaaagcggggttggtggcggctttaatactcggagtccttctggggtcttctccgatcgcgggtttaaccctcaatcaggtaaatggtcggtttactgcttaatagtctagaaaggcaggaatcgatataggcaggcagaaaaagattggcatcattcctagaaacaagaacctgctttatatacatcatccaagagtcaaaagcagtcaaaagggactcgacaccaggtctctactaaaacgcaagattaaaaaatcagaagataagaaataaatgaaggtaaagatgagacaagacagcaatggtgtatatcactttagatccacgcgagaaacatcactgaaaagggataagacagaaggaaaatggcgagaaatgaaggaatgacaaaaccggggtatagagaggatacataactgcaagcttgatcgaactagaaacgaagacattcaaatgcccccggggcaaaaggtgttatggggtattgagaaagtgagattgtatgtccacaaggacagtctcttggtcaaaatgccagcactttacagtatgggaacaactccccaaggagagccaagtttcatcaggttctcggctttttatatgcaccttcccctgcggatccatcgtctggggattttctcttcttatcttgttcgtcttctcgagagaagccgggaccgctttgtactgccggagtcgggaaggtgaggggactgggcagcatgttggaatctgggcctgaccggccaaagccccattcggggaagaagctggaaggcgacgggaggagtgcatcggatacaaagcgactcggcaaggcggatatgggcgtttcgatattattcgagttattcccattgttcgggtttccgctgctgctgctgtaagagtcgtttcgcgaggttgaaacaggaggaggcgggcgcgcgaacggatttggaggcccctgggctcccgcactcagtattgcaccagcggatggcgacggagggggtaagaccacgcccgggggtccattttcggcacttcctttcacaggcgtggaggttctattcccagcggaatcgcgtgacgagtcggccgtggcactgccaccatcggaggtttcgctgggaatctgcactttcaactgtggtcgttttgatggcaacggtccactgttagttcgggatggtggtttaattctttgcgttgaagcaactggccctgcacgaggagtttccgtggcagatctgacaggcattgacttggtaccaagggaagcttgtgggtcgaccttgagagagtggttattgtgagactcatatgaccccgctccagctccaaagtggcgggcgagcacagaatctcgatcatcaataggggtgaagatactccgtgattttgataacgacttcatttgaggtggcgactggctgtgctctggtttcattgctcccgaagaatcatcttggggatgctccgaggcaggccgttcttggtgaccatcaggcgcgaaccctggaggcatcgaatttctcccatgttccggcatatatgcttgcatatgctggtggggccccggaggcattcctgcatggccgtgctgttggaaatgctgttgggcctgatgctgttggctctggtgctgtgcctgctgctgtgcctgctgctgtgcctgttgctgcgcctgctgttgcgcctgatgttgagcctgctgctgcgcctggtgctgtgcctgttgttgtgcctgttgttgtgcctgatgctgttgtgcctggtgctgtgcttggtgctgttggctctggtgttggccctggtgctgtggcggcatttgctgtggcggtaaaccatgcgggtgcataggaggcgtcccttggtgttgtcccggtgggtggccgtagtgcgcaaactgtcccggtcgaggttgttggttcattacatgaacattcgggttgtacatggacggattgggcatgtacgtgaacccgccattttgggggccagggggtgctggcgggggaggtgtcccatgttgctgggggcctagatttgaactgactcgacggatatgatttcttgaagagggacgggaagtgccttgcggttgcggggtgccatgacgggtcatggcatgatggatcgggggtgacgcggagggtgcatggttcatgtgctggaaggcgggctggttttggaggtgagggggaatagcggggtggttctgaactgcttggatctcgtcgggagccggcgaggcctcatattcctcgtcatcgtcatctcgcttacccgcgaaatcttccggacctttatgctcgtggggaggaccgaactatgacgattagttagagattgtcgggatgaatcgaagagacatctacccacatattgatagcgaccaagagcctcgtgcatgtcgcatgatgagtactcgtataatttcttgttgtggccaaatataatgacagctacgtcgacggagcaaaggacagcaagctcatgagccttcttgaacagacccccctttcgttttaggaacgtgctatagccgaagaagctttgatcagcgactggaacggctgactgggatgattaacttacactgagcggttgcggtcatctttgatggccttgatctcaatcttcctgcgacccatgatggatggctagggtgcaccaattgcgcaccggtagcaagattgagaatgaaggtacaagcagccgcggggcgacttgcgagatacctcgcgactatatttaattacccaagatacagaatcgacgcgatggcgattctagccggtgccgcacggggtggatgtgtacgtgaagaatctcggtttcttccgaatgagaagatccgaagaacggtgtggctagtcaacaaagggatctgaaaccagaaaccagtttgttttccatgtaagaaaccctgtagatactggaagagggggtatggacgcgacttgaaaacacccccccgaagttcaaaaagaagttgaacccgaggagacggaagggtaggaaacaaaggaacaaataaaaagacaaacacgaagtaaatgatggaagctgcggagaaaggatgattgacgatgcaggaaaggttgattctaaagatagaatcgagggagagggagcccgagaagatttcctggctgactcatcagggccttaggcgccgggttctatatttatcttttggcagtcgcagcgcgaatatgtcgactgagcacacggtaactcgttgtagttagtgctgtccctgtggcttgtgacagtggagtcttgtccttaggatcctattggcaagacaagttgctgtgatagtattcttcgctctcagcttggatgggtctaccgtctatgctatgatgtcaacccggggaagctcaagctcaatatatacaacagatatataatgacatagtagtggaataatgatctacagaatatcatatttacattttcaggctatctccataggttatttaccccgtagcatagcttatttatgtccccgtgatatcgccaaccctatctccctacaatatataaagagagccagatcttattctcaagtaaacgtcaaagtaaacattcagggttacatatgtatatgtagaagtatatgtaggagtatatgtcaagtatgttcctacatcccccactgattggtccatgacatattgggcagatatacgctgaagacatatcgacacgtctaatgaccgtcctccaatagaacatgtcaatagccatacacaaccttggatccccgaaacccagatcaaacagataatcattgtatcatttctttttatccttcaaagttcccaaaatttaaatcgaaaatcttctttgtgtggcagctgggcatctaacgcagtcgagactcgcgggtaagtttagtttggtagtttggtttctgatttacccctgagcttgtgaatcgcttcgttttttttttcccttctctcccaacactttgctttcttccgctcttttcctttcctctcctttttcttttcttgaggtctcttgcgcggtttccactctgagaagcacagacaaataagatcctaaacgagggattcttttactttgtcctgctgttaccggggctgcaggacatcccggacacgcctagacgttttaactattcgctcggtcgaattgccgtgtcggttatctgcattgtggtcttttgaaatctctactaatctgttgtcgattaacagaagtcccaaaaaagcggacccttaatctctccccacagtccgttttctgacgcgcaaattcaattgccagtggccgaccatccgacatgtccttcctttctcgggtgtttcggggcaaggactccactgcgacgaagaagcaggctaaacctaccgcggcgctcaacacgggccctgcgaagcctaaatggaccgatgcgtggcagcggacagaggtcgccccagaagaggtccaagacctggtacgagggtgcgtgcatgagctcaaggcccgaggtaagtggtggatttccaactcgaccgtgagatacggacatggcatggtgcgtcggattgctgatcattcgtcgctgcagctcttcacacgccattcctcctcctaccgttccgtcctagctccgaccccagcgcagctcgcacgttcattcgcaattactttaatcagtctttcgaaaagggatcgcccgtgaacggaaatgatttgtcgcaggagctccggctcacggagccgatggtgagggataatgttttcccagggattatcagggggtcgctaatctcattcctatgaataggtcctttgcggtgtgatgaaatggtgctggagcagactccctggcggtgttgtcacttgggaggcgtacgaaaccttcaagatgggcgaaaatggtatgcgatattctttggaatgcggggaacatacgcgctgatgcaacattagattcggatatggcccgcgacgctttctcaactttcattccgatcggcggcgactccgatgcacgcaccagtattattctggacttcttcgatcttttggctgccattgcggcccatggaaaatccaatggcttgggaggtcgcaagctttcccgatacgctggctggtgggcgtttgagcatgtcgatacaggcaatggcttcgaggccgcctataagaactgggctgtgtatggacttcattaatccgatgtttcggatggtattctaacaatctctagtgctgccgatgctaccagtcacttgttcttcgcctaccttcgttcgttgtctcccgatgtccctcgcggcgtgagcggcatctcatcgctgccaatttctctccaatcactcgttgaagcgactgaatatcctcccgaaaccccgacattgttgcaagttacgactacaaaggtgattatgattgtggagaatgtctccccgaccccattctccttgttgcgacgcgcaaagaactttgaataccgcgacgacgactggcacctgcaggaatttgccaactacgaagacccagtcgatgcattgaccgacgagtgtctccgtgttcttagatgtatctcatctacgaatcaatccagcgtctcgagtgccaagcagtcaaccagtttacgggatgcatcttggtctcgcttcgaggatattgggttcggtggttcgattgactctgacccggaggacgaagccaacgagactgcttcgccggcgactgcaaggggtggatctgcagcgggcttgagctccgttcctcaatctggaactggggactttggccgtccgaccaccccgtcgtgggcagacttcatgtcatccggattcccggatgaaaacaaattgaaggaccacgtgggccctctgctcctgacccctgacaagttcctgcccccccttgcctctgcgcgtggcatgagttctcagtcgcacaagcgctccttggatatcgagccggctctcgagcctgcggagttggcgagtatcacctccctagacatggacgattcgttctggtgggtttggatcagcagtttatctggcgatgagccgtccgcacgcaaggctgtgtttggtcgatgcgctctcctggagaccaaaatccgggataccaaatggctgatcctcgaagagcagatcaagggtgctgctccagagcctgaggccggtgctcagattgtcgaaaagaagcgattcttcagctttggcagccgcaggggaaagctcaatcgccgcaagtcgttggcgaagaaggtgccttctattgaagactcatacaagcgacccaacaatcagggaacgcaaagcaagactagcatcggaccggatcagcacaagcggatccaggaagctgcggccgctctgcaaaagaagcaccgcgagcaagaagcggaggcgaaagagaaccgtgcaatccctaacgataaccgttactccaagaccaactccatcatgacccttcagcctgccattgtgagcgaggcctcccaggccatgaagtggactaagaattacgataagggtgccttcagggcagcatatctcaatgacaaccgcgctggcactggtgaagaacccgaggacaaacccgaggacaaacccgagccgatttcgaaggacaccgaggagaagtctaccgcgccattggcacctcttccaaccagcacctcaaagagtgttcccccaccacttcccaaagaagcagcagcagctgctgtgtccactcctcttcccccttctcctagggaggcgccaactaaagctgttaatgtcgctactcccgaagagaagaagcccgtcgcaaagcctgccgttgttgaacaacctactgagcgtcgggaatctgtggacgaggggggcaagaagctgaagaagaagactggcaattccggctttaagagcatgtttagtgccaaaaagaagcccgaacagcaacagcctctcgtgaagaccgctaattccaaggaaatttccactgtggcagctactcgtgcggccctcgaggccaaggcgaaagcagctcaggagtccggtcccatgaaaaagaagcctctcccgagtaccgcgtccgtggctaaattgcaaaagccctcgcctcagcgtgttcaaccgaccgccaaggaaccagtggcaaacccctcaagcccggctcaagcctccgcttctctggaacagaacggtgagccgccgaagaccagacgcgccattgagtatgatgctctctcgcgcgttgctacccacgaacttaaagcagccgatcaggagttctccaagtttgaccagggccccctggctgaccagcctgctttcgtccccggagattctcccatcacacctgtagctcaaaagtccgaggttccccagagcccgtccaacggcaatggtgttcgccatgaggtcgccagttcgcccgagtcacctgaagctacacatgatcgctggaaggcgatccgtgaggctgctgctcagcggactgctgcccaagaggaacaggtgcacgaccacgataccgaggccaacacccggactagccagtccgagcgcactgacgagggagataccagtggagaagagagttagtaacttcatccccaatactgaccacacactaacagttctttcacagccatcgaggcccgtgtcgcccgcatcaaggcccgagttgctgagttgaccggcaacgcggaggatggtcaaaagcgctagcctgcgacgttcccggacctgttttcttttgtttattatccctgccatttccccctggctctctattcagtatgatccaggatgtatcttttgttaatcgtatacccttctcccgaccagacattggtcgtgtttgctttgagcgcggtctgatgaccgaccaaggtcaccatttccatatcctggagattagcagactgacgaatactgcgatacgattgatggattctttatttggttgcgacatctgtttattttttctttgatttcttgcctcttctccgtcaatatttgattcgagtggacaaatatcctcctgccttggcttatttcttttccccacctatcgaatttgggctgcttttttgtctgtcacttgctctattcccctttcgctactgctattgattctggttcgctgccaatatgaatcgctttgtgcctttaagttgaagtactatcaatgtaatatggaactcttacttattccaagcatacaatcaaaccagactaattcactaatgggaaataacatacaatatagacctgctactgatctcaatcttaatcatatactagatactaatcctaaacccgaactacaaccccaaagccttcagaatcgccttcccaacccccgtcgccgacgccggattctgccccgtaataatcgtcgaccccgtcccagccgccttcccaataacaatcatctcctcccaaggcttcgcagctttcacatacttcccaccagtaacccggcccagctccgtctccagcataaacggcatagcagacgacagacccaccgcatcctcctcgttattcgagaacccagtcacgccaacgccagagataagcggcacgccggagggcgctgtggcatttagcaggacgcaggggccgtggcagacggcggcaacgggcttattggctgcagcgaaggcctggattagagcgagcgaggtggggttttcggttaggtcgaacattgctggtgtgtatatcgttagaggatgttatttgtatcgatgggatgatacaagtatagctaggagctgaagaaggagggagtagaggtatgggtatgggtaactcacgtccatgaccgccgacgtagaaaatggcatcgaactcgccggcgcgcggaagtacatcggctagcttttccgtgttcgtccagagagctttttgttctttcaggaacttctgcgatatcgggtctgactcgcacatctttatcgaggctgggcttaggggtgcttcgccgccttttggtgaggcgaccgttagggagaccttgtcgcggaggacttcgtagggatgggcgaactcggactttgggatggtatggttagtaaagggttcattgtaggattggtttattggtgagatggaatggaacatgtatgtatttaatttgattgaagctggaattggtgttgcatactagaaaccagccgtttggcttgccggtggtgccgagcttgtcttctgaggtgaggacgacgaggactttgggtgtcattttgggtgagttgttgattggtcgtataaatgaaatagtagggacaagttgattgtgttcaatattttcattttcaagtcggactgagggcgaagggtggctctgggtctttctatatgatcagcatcactgtacaatgtacattatgtatgtatcactatcccgtcattgactccacaaaggtcaataaattgttacatgagccaatgagatttgttagaagaagctctccactgcagaagatgtgcagctcccgatgtcaattatatgatgatgtcatagctcacatgctcaagtctcctgatgtccattcaaagaactgatatattaggagtcactatggtgtaggctgggtttatctagtcgcacagcataaacgcatagacatgagccctaaggtaaggtacatacgctgtacctaggtagttactagatatcgtaaacttggtatttggatattgaaaaaaaaaaagaaaaagaaagcatcagcccaggcgagcacagcctagcgattcttacgcgcagcggtgttcatgccgatgttctggttgctgtccaggatgctcgcagactagcgcttcttttcttcctcgatatttttgagacccttctcggtcttcatcttttcccggccttggtgtgaaactggtgactgagttatctgaaggcttccttttagttcatattgcgaccaaacttatatatataccacagttggacatcgggcttgagttcatggttgaacacatcggccatattgtgacgatctgacctcctacgtacgtgccggacgtgcctgcgccagctgtaccttccgtttctgatagaactgctccttcctcgattggaagtgaacctaaccgagcttccgtcattacagctcgtacaaaccccggttaaagtaactcgtagatagtttttctttcctttctctctctatactttgtaacttgagaaaaatgcactcattcttctgaatcgaactggcttgtaacacatattatgtacttcgtgctggtcacactgcttatataggcggggcgatagaagaaagagtaagggatctatggggacgtgattattcttatactcctattctcccagcgcgcgtgctcctcacgctaaggtagaaaggtgctacagtaaagattatatgaatataagagcataggtaccgcacgctgccacgcagtgctgtggtttttgtcagattgtgatacaagaaacccgtatgcagttcattatagagtgaataacatctgataccctgtcatcctatgctgtaggtgcggatagtggggcgaacagagctgtggaccaatgaaacatcatgaatggggatatgtaaaaaatgtataattatgtaatgatacatgtatagttaactagttatccaggatgtattagataccgattacggaagctaagccgattggtagagataagataaagacggatcacgtgattgatagggacagccaaactccggggaagactaaactccattttgtacgacaatgcataaggtgacatatcaaaaatgtccgaatcaccacggaaaatcagctccaaacgcgaccgccctaaagtacctttagatcaacgcaaacgcattgtcaaagcctgcacccaatgccgcctacgtaagcgtcgatgcacactgcagtcgcccgagggatgctggaattgcaggaaaagcagtgtgacttgcatttttgagacgagggaggacagcccagccgaatcaccatctaggtagcccatgagacacggacttccctttatttgatgcaatctaattcgcacagtcaaactcacatcgatgacgatgttgtagcacggttcaataaatcatatccgggggtcggtctcaagtcccaccatatatcttttcttttcgagatattcaaagacttgaaccaaggctctagagatcgctcttcgaagcggagaagtccattttggcatactagacccccaccacagcatggaactagacctatgtctgtggagcgtcacccaaatgaagggcaactgcctggtagggcgagattcagccgcagatgtgtacttgctccgactgacaacttcactgaaggtgacgatatactgtcacacagacattttctcgcacgtgctgctgctgcagtctcccagtctgacagactggatcttccagaggataccgtatgttacatgaaaacttcatattgggctcttctgactgttgccgacttaattctcaatcagaatttctatcccacagacgaatcatattgtgagaatgaaatcatcctcagacagcagatcttgaaagatttcccctctcgagccggggccgaagttctcatggcatcatttttctcctatgccgaggccaactggtactatttcgacgaaagctcgtttagaaagcagctgtttgaactatatgacagtgacctatcaccgacctaccctagtctcaaattcatttgtttggccctaactgtcttcgccatgggcagccagttcgttcatctataccatgctgacaattcgattgccttggaagccatgactgtggttcaggcaggaatcccagggacgcggtacttccaacatgcgcagaaacttgtgccgcagataatagcttctccttctctggaaggcctgctgagctgtctactactcgccttgtatgtactgccgattcatagcactgaaacttgttacacatatcttgggcttgctttgcgcatcgcaatcagcctcggtcttcatcgaaaatcaacaaattcggcattatctccgtcactttcggagctccacaaccgtgtgttctggactacctacagcattgaacggtatggctttctgtatcaccttgattcttatctttctcttaataatatcccagaatggttgctctctctcttggctatcccgagacgcttcaaaccaaagatatcgactgcctccttccccatcgacagcctgacctggatgttccgggctcctatagagccgagagactactggcaaatacaaggttgactctgctgctcaacgaagtgatttgcttaaggtaagaagcctattgtaatctagataaaggaagctagacaacatccccagctggcatgctaaccctcaatagatccttgaagcacggttcgaccgaggatatccgaagtcaacttttggcttggaaggcagacctacccgctcaattagccacattggacgataactgtttacgactgaacgtgcatttacaactccactactctatgatctggatctatatcggtcgcgcagccctgatcgacaaagtgcgacgcttactcagcaagaaagagcccacaaaagatgaccttgacatagcgggcgacagtcaagaattatcagacgcttgtgcagaacacgcagcgcggataatcgatctcattgatctgctcagaagtcgcgggcaactgagtctattctcttacactgatttccatacctgcagctccgcaaccatcatcgttctcctggatagtatcctgaacccacgaatgtcctcgtttccgacagtccggaccgcaatgggcgctctgcaatatatggctactggcagtgatttggccagaaatagcctcaagtatgtccacaatttccaaaacgtggtcaacaaagccttggcgtctatttcctgtttggataatgggaaatctcgccctgagggagagactggcccacttccgcttggggagccacgtgaagagacgtttaccgaaggattggacatgtaccagcatgaaggcgaagagcctaacctggccctattttctgacatagggattgcactcgaagactgttcatttacagagctacatcttcttgggcttgacagcctatactcgagtgatgtacaaaattggaacggcagttagaaataaatccacgtcttcttttccacttcaatctcaacagaatattctgtcctccttgattatccttttgcttctttcaaatttgtcaaaatgctatttgatgcacgtaggtgtctgcgtggccgaaagaaaagagagatcaacagcagtggggtaatatgataatgatttaactactagtaaatagcttcatggagacaaagtaaatagcttcatggagacaaagaacaaagcaacaaggcctaaaagccacaaagggcaaagaaagttttgacaagctgcttataaacaattccccaccgcatcaacacatcacattaaatcaaaggttataccggaaattcttgtcttccttgtctgtcaagtcctttccagtgacctcctccgcgtactcgaagatatccatccccattgtagaccgacgtttattgtcacgagcacacgtgaaccaatacactccgacggtcggaatgaacacaagccagctaaccagagccaagacgagaccactgcgataccggggtgcatttttcgtgttccagagtaatggtccaactatagcaccgatagcgtagccaacgaagaacaaagcgttgacgatggcctttttggtatttccacgaatattggaagcgtttagactgaggatgaccgttaagatgtttgagatgacggaggcctttgtaaaacaagaattagcaaaattcagtacaagtacgagggtgtaggttcagccaatttacataccaaccacgatgcaacaatcataccccatcccgaggacaagggaagcgtgaatagtagaatgattccgacgagcgggatgattgtaagcccgatggtgatcgcacatcgacgattcggccaaatatagcagagacctattccgacccaaataaagaccatctgaactgcacctgctggtgaagtgtatagcatggtatcgaaatttgtgtagcccaaagagtagatgataagggaagcgaactgtcaccggagtatagtcagtaattgcacacatgtcttcttgtaagagaatacgcgacttactgcaatgactggcgaaggtagtgtgatgagaagcccaaataggaaactcaaatacgctctgatatccatagctgtctctttcaattgtgagatagagaaagttgtctggtctcctccttcggtttccgctcgcaatcgttgtgttgctacctgtcgctcttcgggggtgaggaaccacgctgagtcgggaccagcgggcatcaagaagaagaataggattccaaagaagactgtgagagctccacagatgatgaacatcgctttccattgggcaatggccaatgccgtgttgtgaccgataccatacatcattagagcaccgatgacctgagccagcccgttgcagctgatccatagactagtttgagaatttgatggttagatagagaaaaggtagattgggggttattagggatgtcctacccgatgcgcatgggatgctcgcttttcttataccagagactggtgagcgtcacaaaggcaggcgagaccgcaccttcagccaatccaagggcgaatcgaacacccatgaaagatgagaaggttgttgctcctgccagacactatcttgatatcagtatgtcttcaaacaaaatgttggtgactgggtaaattaccatgcaaactccaccccagagtatactatactcagtcagatttcccgaataatcttgatgaaattgctcgaaactcacataagacaggatacaaatttggcaagcggaagacgactcatcaagtagatggccgggaattccgacgccagctgcccaacgtagaagatggaccctagccaggcgaactgtgtgcccacaaggtgtaggtcatctatcaatccgaacacaccagcgtaacttagactctgcttgtcaaggtctagatgcgggatattagcggtatccaaaagcaagaggaaccaaaacatgaatcaacttacactgagagaagtaaatcaagcacatcttcaagcctctcacgatcagcacccattcccatgatatcgaacaaggacaattgcttaccagtggcaagaccaccaaatcaatcttccatctgacccgtctctcaatcgcagggtcaatgtggattgccgaagtgcctgtttccataacagtcttcggattggattcgtccaattgcatatctgcggttttggtatccgattgattcatcatgatctgagtgaattggataagaaatggacatgcacgatgtacgaaatctcactggggggaaaaggagaacaataccccggcctttatatatgacaaactaccccggatttggcttatctctcgacagccgtgaatgcatgtagtgggtaggtgcgtgcgatccacttctggctctatggaaacgcgacatctagtccaagccactgagcattggcgttatctttcgttggtttgttttatttaataaatcgtttatagggcaggataaagcctgtggtaggtaggctgtaatcgtgccaagcaccaacacatctatagtgggccccaccagatagtcatttgtagaggcaggtatctttagtatctcgactgcatacaaaaggtacataaacatagtctcaatatctataaaccttgaactaattagggagaatgtaggaatatagttgtagagtagacagcgtcttgattacttagtatcaatgttagtaggaacatccagtatagagaataataaacttttccacatgatgtctatatctggtgattgctaacgagtgtctttacactttgatatcatatactcaggatcaatattagtggtagataacttgaaccaggctttcgctatatctttatctctttagatttcctgaagctggtctgatagttgagaaaatcgagatgatgcctctatgttgctcatgtaccttttgtatagtgtcgccatacaaaagatacctaatccttacaagcacccggtgattagccggtgagatctgcgggtacttgtacccgcagggccggtctctgttgccaccgaagtagatttgggatgcgggtacacgtacccgcacgtcaaatgatggcgagtatcgatgccaagataatgctatcggcaattgtaatacgtccagatagactatcatttagtagatcatacttagtctacaataaaagagctgatcccactgcggtggaaattgcaagtttcttgttcatcctattaccaccttggaattaagaataaggcttcaatatctttgaacttgcctgatcatcgataacttgcttacgtctttctccttgttaccactaccaccatgacagcccggaaacccgatcttcagcgtattgccaagccttggctgctgggtgctcaacggacgtacatcttcacgtctgccaacttgattgaccttgacgctggaacagtcatcaagaacacgaccatcaaactctccggtggccttgtatcattagtcgacacctccggagtagagactggcgacaatgtcgaccccgacgctgtgcaaatcgacctgaaaggcaaatacgtctgcccgggcttgatcgatagccatgtccacatcgctgcagtacctggttctttgagcctccgggaactgaaagaggtaagcagtacccagagtatgctacggcaaccgggtgtttgcaagtccatgctggaccgtggtttcacgacggtccgagattgtggaggagcgtcttttgccttaaaagaatcaatccaggaaggcatcatatccgggccgagattgttcattgctggacatgccctctcccaaacaggaggccatggagatcgtcgtcagcagcacgaccccaatgagtgctgtggggggcatgtgaatggggtcggccgtatcgtggatggagtggatcagtgcctgaagtatgcccgcgaggagttgcggcagggcgcggacttcatcaaaatcatgggtggtggcggggttgctagtgccacagacgagatccaacaccttcaattatccaatgatgagataaaggcgattgtcacagtggccaacaatgcgggcacgtatgttaccagccatgcgtacacgccagaggcgatccagcaggctatccgacagggagtcaaggggattgaacatggcaatctcattgacaaagccacagccgaaatgatgaaggagtacggcgtctttcttacccccaccctggtgacatacgcgacgatggccgctcccgagttcagcggattcctcccccctgtttctgcgggcaaaaaccgtgaagtcttggacaaaggccttctcgccctggagctagccaatgagattgggcttgatatttgctttggcacggatcttttaggtcctctgcattatgcccaaagtaaagaatttaccattcggagcactgtccagacaccactggagatccttcgaagcgctaccacgactcctgcgcggatgctgcgacagaatgaattcctgggcaaggttgctccagggtttgccgccgacttgctcgtcttgaatgcaaaccccttggatgatatcaccgttttggatcgaccggacgttcatttactagcaaccatcaaggaaggccgagtcgtgagctcgcgttggaatgtgttggacgttgaagaaaaccgtctgccaaagatcgagtgagaggtggaggggagagaagatgtacagtggaaatgaagaagaggttcgttctggagttcattgaagagtgcttcgtggtggcggcgaaagttttattgatagagtcgataaacatgcacggtgtgcaagaaatggcaccttaaacgggagatcaaaagatacattacacagaacaatactttccttgataatacgagccatcccgcaataataatatgcttcgaatcgcggctattgctggcagataactaggccaaaacgagatcttccttgatacggtaatgtataaccgttggcggatcttcgtaggctctgttcccttttttatagctgccgcaatcagaaagagtgttgggcagacttacttgtgggctcaattccattctcaagtcgctacggagtacggagtagacgggaggggtttaaggtagtgtggggaggatgtgtggggtgccataacctcgcattggtccgtgcacagattttggaccagcgtcttggcgcataatgtcattacataatcctgtcgaggctaccagcgctgtatcttttatatggcaactatatacgaaaggtacatgagcacaacatcgaaaatagtacgcaccgctaagtgtacattcatgctagtcacatcacgtgcaacacttcttttacggcccgataacccctcttacgtctgtgtttggtttgacctcagacttccgtataaatgatctttgcatttcaaattcccagattcttccatcgcctacgttatataccttaagaaaaagccgaaagcctgcgtacattcaatccaaacctcatcgctagcatcgacttcaatcaaaaaccctatggcgtcttccccggtgcactctcatgttatccacacgtccaaaggtccgaccacattcaggacacacgacggagcgatgtttgacatgctgtattttgatatggcgcatcaaggttgaatggctgctaaatgtcgtgtggcttgtgcagccctgccagaggcatctgaaacggccgtcggaactgaggtaaaaggaaaactattaactattaagtgggaagagtgagaaattctgactcacactcgtccctggtcttcaatatgagcagaggttgcttccacgtgagcgacttgaatgttggggttccgaattgtggtttgaccgggacggagagagtcttcagctctatactgcgcggtcgagagatgcggaggcatggctcagagaatgtttgtaaagaggccaacctgtagataataccggtgtctgtccggccgcagaggcaggtggttgcgtagtactagaaggtccaggatggtgattgcgttgctcagagccacagctaagctgaagcattcttctcatacttcaatcatcgaggtcagaagtgtattccataatagaaaagaagaagtaaggtagatgtctatactaaaagtgagttgggtgctttgtcttaaatctgccaggaaataatctgtccagtagacatactgtcaaagagaagttaaggttaaggcccctgaggtgggtccatatttactccgctccctccacttcctccgctcccaaagtctatgagtccaaattcaggtaacaaggcctcaatacccggttccttggcgaggggggtagttagctacatagctatttagttagttagtcaacttactaactatggtagatgattaaactactgccaagcaatatcaatgtacattcagatatgatcacgtgatatgccatgtggtggactggacccaccttcccttttaggaagtaattattcctatatatttcatagcaactccttcctcctaaccgacattccccccagtggctgagtgtgttgacacgcgtttaaaatgctaggttaggtactagctgtcagcgttcgacccacccagtgcacggtcataaatgttccaattacgctcccctaattggcccaccttgcttagtcgccggtcaggacctccagtaggtccggcaatgtgtgcgcaggtggggacgactagatcttagggtaaagatggttggggttacttaagcattatgatcccctaagtggcgacctgggagtataaccccaggcactggatgggaatgtccttttttgccttttttttcccttctactttcctctcaagtctatctccaaaactctatgcctgccgctcctctcccccacaaagctcattgacgcttactttagatatctatcatgaaagcagtattaatactatccaatgagagacatagtcacttagtcgcccgtaatagttaactagagatctgtttctaatttatcttagtccagtatgtatcgagcttgtatttttgtactatctcttctacattgtactccgtaccatctaccagatttctatgtttaaacccctccacggggaagcagttgaagcgagtcccgtagaataatatttgacaggagtgacttatttttgttaggtgtatacatacaaattatagatacctgccacattgattaaggcaggagcggtaccaaattaggaaggtgcacctaagatttcatccaaaggggggagggggggagagggctcgccatagcacagccctatatattatgtatgtgcagaagccaaaccaagaaaagaaaatcgacaaaaactccttttagggagacagacgaagggcccagatcactatacatatagactctctctgcgtgtacacaaacacacaatcccaagccaagacaaggctcgcatgcaatatacaccgggtatcgagcaaaaaacaacagcaattcatcgcaacggatcataattctgcagcgttcgcagcgttcgcagcattcgctctgcactgcttgctcatagtacaaaccgcagtcgacgggtagcctcagccgccacgagagcacttattgccccgatgaagagacatatggagatggcgttatacctctccttgtccaggttcatccactgcgtgtccgaactgttgtcggccgcgggctcggcgcctggttcgaggaggctgaagacgatccagctgatgaaagtgccgacgaattggggtagcgtcgtgtacacattcagcacgcccaggtagatgccagccagttctcctgttgacgggatgttggaggcgcggtcctcctcgtcggtgtcgctgtcggtggaatcgtggtggttcagtcggagaacgtccagctcggtgtcggcggcggagttgcggaggctggcggaggtgatcattgtcacgccggatcgtgaggatgggattgcgggggaatagccgcccattgttagtttgttgatttccacgcccatgaaagcgaagggggcccagccgctgattgcccaggggataccgcatactgctactaggaaggttgcgaaggcgcgcgagtgtgctagaggggcgaatatcattgtggcggcgaacatgacgtgggatatcagccaggcggtttggaggtctggtcggattgcgctgatggctttgagaaccgctgcgacctttggcgggggtcgtgcggtgaagcgtatccgcttgctatcgggctgcatgatgcaaaagggtaggagtacagagctgaggactgttatggatgagaagaccgttaatgatagactgcccacgcggccgacttcaccaagcatatcggttgctttggccatgtcgtcttttggtacttcataacggaagtatgtttcaccaacccaggttgtgctgtagaagaggaaggggaaccagcctagttaatgttagcttgctgatttcctagtaaatgccgaatttcataccaatccaagcccaaaattgggcccagcaaattgcttgaatgcgaggcggcagttcgaaagtagttttgaacagctgggagaggacctgaatagcaccggcacttccatcatccctatcccaaaacattagttgacgacaataattatcggttcgagctcaactcaccttgccgagataaggactcgctcttttaccgagtatgaagtgactgccacagccaacaccaacgacaaagcagcgatcacagtcatctgcttgaactgcgtatctccaaggaaagtaccaaagatgctcacggtatcgatagcaccaaccacataagcaaagagctggccaatggcggacattctcccggctaaagaaaggtcagtgtgttttgggcggagacatatggggaagcgccataccccatgcggacccagcttgttgcgatggaatcggtagcgtatccacaatcagaccgcgacagcatgcttgaactaagatattgtaagctaccttcaattagtgcgagtacatgtgccacttaccaacgttgatggagaaatccaccgcataaatactcactacagccagggcaattgtgccattcttggcctgtagaaaaccaatattagcttccacgtagatagatttagccaggtgagggttccgataaacacgatatataccttttccgggtcttttacaaataaaccaacaatctctgatgtccaccctaagacaagcagacagaaagcgacaacaaacgagccaaagatcatgaaaggtctacgccgaccccatttcgatcgtgatcgatcggcaataactccaataagaggctggataatcaacccagataacgggccagcaatccacaccaacgaagtcttagactttgtcagaccgagctgaagaaggtaaggtgtacaatctagcagcgatcaagtcagcgatcataccctaagcacctaagcactattcggaacgggatgtgaatagctcttacaagtcatctcagtaccccacgtgaacctagaaaacaccaagtcagccacagacacaaaacaacgatccatggaatcctccaattgcgattgcgattgcaccaaaaaaaaaaaaaaaagcaaagctagacaatggaatgtcgcgcaacatctacatccatatatccaaacgccgaaacagagagggacgatacgcactgcaatccgaccaaactaaacgtcaaaagcgccatcctcgtagactgattccgacccttgatggagggcgtccccgcccatcgcgcagcctgcggcatcctgattatccacgcgctagcacgcactcaacaggtccgcgctcatgcacctgcacctgcaccaaacccagagtacgctaatgacggcccagccagtgacagaataccgattaccgattcgaaagtcgaaagcgccagacaggaagctcgtcgcgacgcgcaattgagaatcagacaaatatgtagaacgtgcgatgcagcagttcaggttcaggtgcagtccgggaatacgttccgaggaccaagaaaggggccggcagtagtccgctcgtatcggagaattaggaattgagtcgcgtgctcttttcggggtcagctcgcggggggccgaaacagcgcacggtacgtcgcgggttcgtcgcgactcgcttgttgacggcgcggagagcggggaggatgcgtgggttgctccggggtcgtcggtgggcgtctatgtcgtcgaaaggcgcctatggtggatttcagaaagacgttgaacagttcgaaggagaaggagagaaaatcggcgttggcctgagcgcaacgcctctatgcgggccccggccttatcgatttgattaatttacgagacagacccgctgggcttcaagcccttctgcagatccgggcttttttgttacgacagctagggtcgagggcgttttatttgttgtctgtgtacgggttctgtttccactttcaatgctttaggtttctttgctctccagttattgttgtttgcagccaagggctgggtcgccttatgtcagcctctgggatggaccctttgtcgctgattggcccgtgtggtgacgtaactcagggccctgtgcgccaattttagaaacacaggggaattatacgaagatatacgaagacacgggatatgacaatgtgcaatgtacgtgcattgggcaaaagagctacaggggctaatttgatatcgcttacctgacaggtgtacttttgctctacgctgtacatattgaaaaaaagatagaaatatgtggatgacagctaatcttatagcaatcccaagataaagggacatatccaccgaacaaaataagggcgtaagtatctttcttgcgttgcatccaattctaatatcgaattggtctcgaaaacctaagtatcacagtatgacgcgactcctgcctgccggccgaccaaccaaccagagtcagaaaatagagattttaattcctttgtatcccaatccgcttcccataatcatcgtaaacagctatagtccgaaaacctacagccggttgggggccgaggtggtgacgggccactggtagccagcggcgtcgctgaacttgtagccgtatgaagcagtgaagtcatcaagaacggcgggtccacgggagcctggaacgtgaattagctagagttagaaaagaacgaagagggaaaactcaccgtaggggtactccatggggatgatctccttgttgtcatccaagtagtgcaggagaggagtgaagatacgccagctggcatccaactcatcgtcacggacaaagttggagtggtcgcccttgaaggcgtccagaatcagggactcgtaggcctcggggatcttaaggtcggagaagcgacggcggtaggtcaagtccagctcggtaaccactgtctgcatggagagaccgggcagcttggagttcatcttaatatagacggactcgttgggctgaacacggatgacaagctcgttacggggaatgtccttgaagataccggaagtgacatccttgaactggatgcggacctcggtcttctgctcgttcagggcctttccggccttgaggatgaagggaacgccgtcccaacgctcattcttaatgtatgcaaccagagcgcagaaagtcgggcaacgtgaatccttaggcacagtatcgtcctcgaggtaaccgggcttgctgccttcgagggagcggccgtactggccgatgatgacgttcttgggctcaatggcgtccatagcgcgaaggacacggaccttctcatcacggatatcctcggaagagaaggaaatggggcgctccatggcgagcagtgtgagaacctgcagcaggtctatcaaaatgttagcatctttctatatctattcagtatgatgaatgacttacggttctgcataacatcacggataataccgaactcatcaaagtagccgccacggccctcggtgccgaaaggctccttgaatgtaatctgtagccggtattagaaccggaactccggactgagatcgcttcacatacctgaacgttatcgatgtggcggcggttccatgtagcgttgaagaactcgttgccgaatcgcagaataagaatgttcttgaccatctccttaccaaggtagtgatcgatacggaagatctcctcctccttccagttaggctccaaagccttctggaggtcgcgcgagctctgtaggtcctttccgaagggtttctcgacctataagaaagagtaggcgtatcaatatggggttcgttctagccagcttgtcccgagaaactcacaataatgcgagcgaggcctctcttaggatagcagttgcgcttcagctgctcggacacggtggtgaagacactgggtggcagtgccatgtagaacacgcggttctgctccttcgattggcgtttgttctcgatctcctcaaggtgcttgttcaggttgataaaacaatcatcttgatcatattggccggaaacgtaggaacacatcttgcagaactgacctaattgatcctcaacctcctttgtgggaatcttgatgtacgagcgaacgcgcttgaggtactcgtcgtggtccatctttgtccgcgcatatccgacgatatgaatgtccttgggcaggaatttgttgcggaactaggtcatacttgtcagtggataaccggtggatgctcagtagaaatagcacatacaaggccaaagagtgcagggaactataagctggtcagtacgtcaagagtcatcaccacctatggaaggggtacgcacggtcttcttcttcgccagatcaccggatgcgcctagtaccacgatgatggtatcatctttaagttcgacggtgctgaatgccatctccattgtcagtgttgcgtttaattgaccgagaaagaattttgcattggacgcggaatcgaggggttgagcgggggagctctctgggcacagaaattctgcagaagcgttccagggagggatcgactatggggaagaaggcaataacgtccacaatagcacaatgttgaggggataagttgaggttgaattgagctggaggcagccggtgggcttccgcaaccgtggaaagagtgatgtcagagacgcaagaggggaaactcacccagcaccatggcggtcatcggttttgttaatcacagacatcttgcaccaaccgcctaatacacaaagtgaagaagaagagtcgagcggagtttaaagagaaagagaaatattgtagagaactccaacaggaccggagtacttttttaaggaagttactcacacagcttcggctggtggggctttggctgggtattgatgtattttatgacttcaaatacaaaatggttttgagtaatctacttgattctgatatttaccatgactatttcgatgccgacctaccctagcctcgtggcgaattcagtcaattttcttatatcaagttctttctgacagatcttcatggtcattctgactgaaatctagcccggagcttacccgtgatgactatcaaccccacgcctactatcagtctatacaacatacagaactgattcggcctcggggtaatacaaagtacctcgggtcaattgtcgataatatcggacatgagcctgccgctaattcttattctaataacagatctagaggtcatctgataagaagtgcggtttactcctaaatgcggatctatataaagaggctaaattcgaagatagagtaagacgtgtccataacactgtcctatatttatgttaatagtgtaagtagttactccggagttactccgtactgttagttatagtatgcacaactttgcggtctaccccgtataccctcgtatagtatgcatgtatgttgtattcaaagcggagcagagaagctatcgcatcagggtaaggttgcagtgtccactaaaatccttcagtgtatctaacgaaagtactgcgtaccaaacacaatacaataccttcgagcacgcaacttgataagccttcgttgtaccggtgacccaaatcgtgggggatggatcggcaggttggtcatttggacttttggacccagacggattctgttttcccgcgagaggccactttcttaagtccggtttgggactggtattaaccccatctcgaattcttcccaatccggaacatactattaaccgttgctacttagggctatacgaatattatacgaccctatctacactctacgcgatctgttgtctctcggtctcttgaaaattgtccaagttttcatgaatacatccatggatacatacggtcccaaatgtaatcgcggtggggcaggatacaggaacttctagatttcccaatcagtggtctcggtctgggtgaagtatatgatggaccggaacgctacccggatcatgtcactgtcactggtgatcagttggagatatgattgtttcgatgttgtcaaggacactggctaggttggataaaaacaattattcactccctagacctgccgacaataccctctgcaatttgctttttcctggatgaaaccttccaactttgaaggttggaaccctgtcgtcatggctggagtttgtcagctgggaagctccaggcttgaagcttggacgtgtcgttcggactactgtagcccgagtggcagtggaaagtacaggcggtaaatggtcggtaaatgacctcgagggcgcggagcggagaaacaagaatccccaagcttatctcatctcagattttgcctatctaatcgctgatgtaatagagcggtgtggcaatcacgggatctcgcttagccctgatgcgtcacgtggtcggtggctcgctaagatcccgtttgggctagggcgaaaaccaacacacggctgcccaaattgattgtgcgcctgactctatcgaagcgacgacaaccacgacaaacgggaacgacttttgatcttgcgggtcattccttcgactttctttccttgcccgctccccacagaaacgccgacacaatgccttcggaacaaggacaccgccgtgagtgaatccctcgatgtcttatcgatcgtcgttttggcggtctcgaaatcgcaaagccgcattatgagcaggcacattgtgtggtcgcacactggataaaagacatatatgctaacgatttcttcttttctagtctacgtcaagtaagttaccaccgcacttttatcgcattcaaggatacaccagttcgacatggaggaccgatttgggggacccaagacatcgccactcaaatcgaagcaccatacgatatgaacagagaattaatacgagtttctttttacaggggacgtcacctgagcttccagcgcagcaagcacgccctcacccccaacaccaggtatctacaccctgcgcacccaaattgaatgctcggatggaaatctgatatatggttatacagcttgatcaagattgagggtgttgatgacactaagtccgccaagttctacctcggcaagaaggtcgctttcgtttaccgtgctaagcgtgaggtccgcggctccaacattcgggtgatctggggcaaggtcacccggtcgcacggtacgtgaatacaacagacagttccatggccatattcgaatggtcctctgggagaaacctcgaactcgaatttcctgtatctgactctttccaggcaactccggtgttgtgcgcgccaagttccgcaacaacctcccccccaagtccctcggcgccaccgtccgtgtcatgctctacccctccaacatctaaacggcttctttgtgttgttttcagtgggcgattcccttcttcgcacagacggtcggtcaggcaaggaaaagtcgacggaacgagccgatgttgatttgaggtgatggagttggcgggtggataacgttttgttcatgggagaaggcagggccaacaaagccctacgaatcaaaaaattacactttcatagctgtgtcggcccaagatactgggaacgagcttcgtctcgatatttctccttgttcttacaattggcgagcatgatgtgtctggtcgcgcagcgtcacttctcccattttgtatctgacgcttaaacgcaccaaattccataccatttcaaatttcaacagaccggtcaatcgatccgcttcttcgtgcgtccggcttccgtttttttgttctagaagaaattgcatttctgctctggctccaaattaccatggcattgttgcgaattgttgcgaatataattatactccatggcaacagataaacagacaaacagctcgtattcaaaatcagtagctctagcactaagcctgtgtggctagatccctaggttgatgtggatacccatgtcgaactattatatatcgattcgaggttataattctacgatgtaaagcaaaatcccaccgatattctcctttttattgtctcaataaacccacaagaaaaagatgtacaaattatataggccaacataaaacccgatccgaactccactttagccgaagtatatatctccaagtatgcaaaacaaaccaagtatcctaaaccgaaatgcccaacaccaaaattccatcataaatcttacaaactctccttatgaaccgcctgaatatgcgccttcaaattctcccgtcgactcgaagcatggggacaccgcggacacttgaaagcgcgcggagtgacatgcagagtctcgatgtgtcgcatgagcactcccttgtgcgagaaaaaacggtcatatcgacagccctcccatttgcattcgaaagtcccgtgatcattgccacccctggatgaagcgaaacacgtttagaacattgattacgatagtccttggaaagaagaaaacgaaaatacatacttcttcttggctgcagggccacgggattgacacggcattttcgtctggctaggctctatgctggcatcatcctgccgaagcggctcgtttattataggtgccgagacggggagatcatcccatctggtgccgtacaggcttgctggggagtgtacggcggtggttgcttgggatgaaatggatgtcgggctgtgattggtagaccggctgtgattggtagaccggctgatggtgcctgggtttagatataatggggagggagtgggagagagtattctgctggggataaccggtgtagaggggaaacatgaggaggcaaaggggggctgtgccgagggaggttgcagctgatagttgtatgaaagaggttgaggggtgatcgctctcgtggtgagcgatggatcagtggatggagaggtgagaagatactcgtctgtccaatcccttaaggcaatgtcagaccacggaaattcggactccgagatacttgggatgttgttgcgtgttggccacgccatcttgcgtacaatcaccgatctgggtctggatgtagagagtaagcgttggggaggcagagacaagatctagaaaatgctgagtgagtgtcttgagccgatgcagcatggagtatttatgaaatccgagccgatgtgaattgtggtatgcagcggtcaacttcactcgacgtcacacagttgggagacgacacctataaaaaaggcctggggaaagtggcgcaaccagttcggccaaaccctaggtttgtactagaaaacctggcttagatcctataacgccaggatctagatccttgcatcgactccagcttcacatcagatgagacaaacgcaacctccacgaaaccatatgatcgtggcgtttttagcgggctgagcataaatccccgggtttctgggctctcaggctccttggcagggaactcatcatttttattggtgaattcttagtatccgtttcagaaagtttctagtatgttgggaacaaaagcgacagaaggattactatcatttgaaagtattatcatgctgcaagccgtggccaaccgtaccaataggatgaggttgcagccaggctgactgggaatatacgagagatcggcacattatgatgtctattctcatattttccctattcaccgtactatttcccgttccttttttttcatgcagccggcccatgacaatggcaatggaagatatatccggaaagcctaaccgtctactgacagggatcggggtttcattagcacttggggcagttgaaagtattaaagttaagatattatcactatttattccagggactctaatttagctgtagccatagcataacgagagaccaaagatccgactttctgtaaagttagggttacaggaactgtgcaggacgccggtacatacatctactgacccgatttcgtatcccgggatatccccaaaataatagagaaatcctcgaatattagggttaagcactgagtgtgacgcttgtacatacatacactcgatgtggcgcagtttaattgcatgagccgacccgatttcctgcctaatctcatcatttcttactcccaacgagaatatatacgaggctgtgtctatgcgttgacatctacaactgttacttgccagatgttcccaataaagagtggattcgttgagttttatatggatactggtagacaaaaaccgccgtacacgtccaggggcgagggttgggataacatcaccacacaaacaagagagccaatttccttgcgacctaccaaacgcacgaccaaattccaccataagaaagcagtaagactggaattggcctgaaagggcagacgaacaagttgcaatgcaaagggcgcagcaaggttcctggcggttgcctttggttgccttaccaatgatatcaaggctaaggtgatggctgaaatgggtccacacctccatgcttatcctgaccagaaaaagggcggaagcatctgtttcgtaggtgtcaacaagcttgacgcccagatggcccgggagattttgaatgatctcctgaaactcctttgtcgcgtccttgtgtcgaccatcgagagttagactgacaaggatattcttgtcgcgaggggccgctctggtagcgacatgggattctgcttaccgggtgatgttgctcttttcacaaacgccggggcgattgggtgtgacccaccctcctaaggagtgataaccatgttacgcgccgggcttttataaagaaaagagtgcactctaacgagaacactaaacatggggaagagaaagaaagaaaacggaactcaggacaatggtggggtccttatgcccctgcgggctttgccatactctcgcttgtccattgggaaagaatgacttcccccggaaaggaaggaacgatcgaccaacgacctcaaatgagtcccgatcatgataccctaggggaatatctgggcgctgttccctagaagcccggcgcctgagcgatgtctttgaagactcgatatactgggtcgggataggttgtccctttgttcggctcatcggggggagggagtgactaccttggccaagctctgaatcagctatggctccattcgcgtgctcttcggtagcttgaccaaagcgtcgaattgaggctgcatctttcgattctaaaacgcctttcatctcaggtccgtggtctcattccaggatatcttctgcaagtctcaaggttcttggctcttgctggtccaattctccgcgaaacccaaggggtcaaaatgtccgaaaaacagggcgtgaccggggggaaaccgggttcttgcatgtgctgaagctattgattttttctttggctttgggctcaggagcccgacgatagatctttcctttctaagagggatggtgcttccaagaacaagtctgccactgttgaaattgaccttgactcccacgccgcattgttatttgccatctgcgtgacggcagtggatttatttgccggtcaccacgcgagctccgtatttcttggccgggccctaacgagggcgaatccgtccatagaatcggatcggtgaagccagcggtttggaccatccatgaaagagtcgcagagagtgatttcagatgagatgaaggttgatattgaccagcaagggaccagggattggacagacaaagtatctctcttgatcaccggaaggagtcatgttggcttatccctagcaaaacaaagcctaccagcaggctgaaacagtgatacaaaaagatgttgattttctcactctctccaatccctgatcctggcgagcaataagttacaggcccgatgaagtttgtgcccacacctcatgtacctacgcggtaacatccttcttccaggtgttcttccaggccttcgaatttgcaccaccactagcaggcactcgccgatgatgacctggtccttcacaagaatggatccctcgaataccaggcaaacagccaccagttgagttccaggccccgttttctctcgaatcacgctgccgtgcctccgtaccacggagctgatgaaatttccacccttgttcgtgcatccgatggtctgaaacacgctgctatagtcctcggctgtctccattagggacgatgtggctatagtaactgtgcgtattcaaacccagggtgccatgattgattgcttgtggtgagaagggaaacagtcgtggtgccgggagctgatgaacaggtcgattttccagtccataccatagtaccacgatttcgaacccctgccttgactccgacgatagcgaacttctcggggaagttagtctgctataacgatagccttcatatcggtaccaatgctatctcccgccaacgcctgcgctggtgctcggttcgagcttaccaagtgacgaagccttctccaaaagaatctgaccggacgtccacgattgcaggagagcctcatgaccatctatccacccgtgtgtgcagccatcactttgtcactgaagaatgccttattgggcgacgagcgaaacggagacaggagacaatgcacatcgggtggatgtactacaagggagttcagaagccaaagtaatgattcgttcaccacttgctcgtcttttgtttcttctccgcgatctccacatcggccgcagctgcagcggaaacaacggatcacttgctgtagctgcgacttccgactctagcgtcatgcacgcacttgtgggtgatgctggtgacaaacgcatggatgaaaagtctcccatcatgcggtgtcgtcgacaatcaaggagaaggtcatgttctgcgaaccacattcatccaaggatcaagtcgtgtcttcctgggtctgcaaacagtatgtgatgttgctgtttgatagggtgagaatgatagcgtgcgtgctcacgtccaatatatagcgtatggataagcatcaggtcttgggcttgaactgcagctgtcgagttattgtcagttgaggccaaatattagacagcaaaattattcaggacgtaccatgggtatcatatggtgatagatgcatccgcccatcccctattagaaggaggggaagaccggacattgttgcagttcttgcgttgattcttttcccgatcattgtgaaaggaatccgcggcaatatttggaggaaggctgagtataatgataaaatataggaatcaaagccgagaagtcattgatcaaagttctcattgtatttatcaggcgatcggggggtgagaattccatgaggcataagagaccagataaccatgaaagagaagtgagagagatatacccagaaatcgaggctcaagagaaacctgcctgctgatgacctgaaacgaccagcatcgtatctcgagacccaagtagcttggagatataacggtgaagtgaaagaggaagaaccgtgattgagctcggctgatgcgaggagggggggatgggagagagacgtgactattgctttgattgtttgtgtttgggccgtttgaaagcatttgacaaaaattcacaatgtccagctgttgctgtctcttttgcgggaatggcatctcggtgtctagcaaacccgctttctggggggtttacaaaaatcgatgaacagcctcaccattaaggctaattgctgggcgtccaccagtgcatggtggttacggcccgagagatgaggcataaacaggcttcaacaaggtataagaaaggctggaggtgtaaatcagtgtgctgtatgggagagaaagggggtcagaagttgttgaataactcacttttataattatagagaatttcctcggtataagtcaaaaattggtggtcatctctatatcgcatatcttcaagatcgcctataccaagcaatatagcagcagttgtatggtttggggcgacttcaatccttggagaagggaggttgaaacgccaccaacccgagtacatttggttcgtgacggtccaaactgccagattggcgagcaaccataggttggaggtgaactgagaatcgtaagatcctatactacaggagggctgttgaatgcccaagataatataatataatataacatggatgtgcagtttccatgagttgaaacttctaagatattgtcatgtacttatacagctgacaccaggggcaaatggagcttgataaagaagacacagtgatcaaacctggtatagaattatatagattttggtgggttggctttatttattatacataaaggctcaatttgcatcatgactcatatcaaacagtaacaaagaacaactccatggcaacccaagtgagaggcattgcgactgtaataaaaattaaatagatatgcattaacttttaaggagaatgtgtgctaagtaacactcgcggacggggaattagtaaggtatccagagggagagagattaggcctcgatttcgggcttcgagtcagcctttcgctgagagtcgataagctcctggcgggcacgctcttgctcagcaagaccggtcttctggacggtgtgatggcgggtcagctcacggcggcgaactaacaaagcgagaacgaagccaaggcaagcgatggcggtgtagaagatccacatgcggttcagggcatgtgtgaaggcttccataacgaccttgcgctgggagggagtaagcctcttgataagggcctttgaagagctgctaaaggaggcagaaacaattgcagcatcttcagcgcctagggcggcgatgagcttggctgattgttggctcatgatgttttggtaaatgacagtgcctagaacaacggacatggaagtggaaagttgacggacaaagccgaaagtggctgttgccgtggccatgtcggcagggcggatgttggcttggaaagcgaccaaaggtgcctggaaattaggaccaataccgataccagtgattaactggtagatgatgatacggggccatgaagcgtaggccttgaggtcaatgaaaagtccgaatccaagagacatcaaggtcataccgccgatgatcagctcgcggaagcgaccagtcttcttcataacgacacccgtggccgcggagccgattgcaagagacaacaccagaggcaggacatacacaccactcagaatgggagtcgcttggaggactgtttggaagtaaagcggcagatagtaggtagcggcgatgaaagcgaagccgtggcagaaacaaacgagcaggatgagaatgttgtaccactcgttgaacagtcgcgggggaatgattgggaacttggcaaccttccattccaggaacattgccagagcccaagttaacacaccgaagacaattagacagatgacagtaggtgaggcccaggggtagttgacacctccgaactccaggccgaagaggaacatcagcgtcccgccgatgatcaagaacgttcctgtccaatcaatgcagcgcagaccagcccagaatggagtcttgggcgattcaatgtgaaggaagaggacaaggatagcaagcgagacacctccaaccggaaggttgagatagaaacaccagcgccaagtcacttccgtcgtgaaagctccgccaataacaggaccaagagcgcctgcgacggcccaggttgcaccgaaaagaccatagtacatcggacgatctctgtatacaagttagcctcgttgcatcccagaccaagaagtcatatcatacctcaagctgaagagatccgaaacactgatattagccaggataatgataccaccaccaccgacaccctgaaccgctcgaccggcgataatcgtggccatattatgcgccaaagcgcagatcagactgccaaccaggaagacaacatttgccaagacaatgatagactttcttccccagatatcactgatcttaccccacagagggatacaggcggcattcgccaggagatatgacgatgcgatccatgagaaaccgctctccgaggcaccaaactgcgcggcaatagtgggaagggcggtggaaataatagtctgcaagatcaacgttaatgaccgaagcaaggggaatcaagtgagcatacacataccatatccaaagctgccaagaatagagccaactaaatacgacatcaaattagctttctgcacttcacgaagtttccccgcctcggagggtttcttacacatagcgccatcatcacgacaatgatctttttcttgcccatttttgctgcctgggagggtgcgtggtctagaggcgcaccctctgttgtcttttccgttaaattctcatcgttgtgttggccagctacctcagttacctggtcgggggtatcgggggacttttccgtgtggggttgatcgatttcagtattactgctcgaggcgtctggttgctggcgctcactcatcatgatttgtgggggaaaagaaagggagaaaaggtttctagaaagaaacggcgttaagagtccgttccgtccaagctaagaaatgtccgaccgcggaaaatattttttggctgctagaacggtagaatcgatatgatacatatattataaaggggtcatcggatctcgtattttcggggtttcaaagttgaaaggcgaggccgaagtactaaattgtcgaatccagtggatcgtcggtgtcggcgctcggataagccccgatgccgagcttcagggcttgtttttacgaaaacgtgagtcattggttagacatcttgttttacgagggccaaaaatggacaaatatatttctaacatatcgctgttggatggggtggaggctgatcgcccttgttgtcaatttgaagtggccatctccctgatcttcgacgatagagacatagtataaaggagaatacttgcggagaaatatctacgatgggaccaatgcggtgcgaagaacacgtggttgtcatttgagagagagccagctcgcagctcatgcagagagcctgaccgactttcagatttaattagaacaaagtgcaaaccatcagaatcaactcgcaaccacgtgagataggcagctggcagcccctagtcatatctcgacacgacacaataacgatgcggtccatgagaaaccgctcacagagaagacccaccatttaatcacggcctccactggccaactcagagagccattgccgatgttgaacatgagccaaagcagcgaagtagtctgagagctcgtggaattgtagttggaagcgtttctttagagccagtggattgcatctgggaaatctcagaccatgcgatttcgatggcgatggcgggaataatgcgaattattaagaattgaaagagtgttccaatatcgtgtccatggccttccccgggaatacgtaatggaatcactccacgccgcttcgttttaagcggcaaccgtagctttggatactcgcatgacgctgccctgatctataggctatagcttcaatgtccgcgaaattgaagacgggagcggtaagacttgaggcagccaaagcttggaatctgacgttaataattcgctcgtgggtttgtgagttgtgtgtataaatatcagcacacggacgatagccatggaattccgcggatgtcgcgcattggaaagggtgtagaagatatattccttggggaagccacgaacggtaactcggagggcctgtctttgacaccttgattctcacatttggtgacccaggagagttcgcgtcgaatgcgatttataagtatcaaaaggcgcctaaccctaacgttagtcgctcatcgcgttcttggggcctcaagatgatgccaaactgcatagcactggaggtacggagtaactacgcgagatcttggttatcggcggggccagagatgacgctagacctaaaagaggttagcgtagctttcatgtgggaataggtcgggcctctacgtatcgtaagcttctaaggttgcgatgcgtgatgacaatctcaccgtccaaggcccccagggctccctcaccttcgattctaactcgagtccagcactcagcttgggccatcttcagtgcggagctcatcttcaatcatggtacacactcagagccttcccatagagctcctagatctcattgtctcttttgtccgcccagatgatgagcttccgagcagagatcgaagaatgaaagacgatattgaaactctgcgcaatgtttgcctagtttcgcggaagttctatgccctgggccagccgttactcttccgtgttcttttttatgatggttcgcatgattatcgaatgtttaccagaacaatttgtcgtcgtccagatcttgcaaagcatgtgcatcagatctgcatactgcctaccctatccttcggtacccaccttcttgacgcagaagacctcgagctgtccaaaggcataatcgaggaccttcagttgggcgatcaggaggacacatggatttcgtctatagagggagccgacctcggccttttcacagcattagtagccagcaaagcccccaatcttcgctggctacatctgccagtatcccaattctggattcagccattcatccagctattccgccacaatcctgaatttttgtcaaaccttgagtctatctggattgaaagcgatgaagaatattgcaacacggagatgtattccagaatgaacattgcttcctatgagaaattcctcacccttcccaaggtcaaatcttcgacctttgagtacggtgttctctgcgacgcttaccttcgtccgttcccatcttcctggctgcctggaacattggagacggaaagactggcctttcaccactgccaggtcgatcctttcgccctcgaaaagctcatgcaagcgtgcaagaagctaaaagccttcacctacaacaatttcagcttgcacccgaacaaccgacgaaatcgtgcggaaaaactgcccgagttcaacgctaagcaggcctacgaagccgtcctcctacacaaggacactctcgagctcttccacctggagtacggaacgaaaccaccgcatattgatatcttcgagcaagtcctttctggccgcgtccaggttggctcattccgcgatttctccgtgctcgagaccatcgtcatcacacacgcttttcttccaccacaccccgaattccccagctcgttaaagacactccatatcatgaactgcaaggcatctgtctgggaattgacgcagagcatcgcgaaagattgtgaaaatggtctttatccggagttgactgatgtcagcgtattcgcaaccgacatcacaaagcctgctaagcttcaaggaaaacccctacagcaatgtctccttgatctagaggagatgttcaaaggaaccaaagtgaatttccaaatctcaccgtatgaaataccttattctgatgattacgataatctcgacctctatcgttcttacactgctcaggaatgatgatgtattgttctactacggcagccgtttttaaaatggcagccgggccacatatcgactagcattatgatcgagttcggttatgaggaagatttccaagaacccgccaagagcgaatcccagctggatgcaatccgaccacatgttttggattgcttatggagcgggctagggtggacactaagcctcgatgagatcatttataacaatacatgggaaacagacagtaacgaaagctcgatcgtctagtccagttactccagccattgattctgttataatatccacgataatattccttatcatgtaataatatctctgaccgaccatgtgagttttaacattttttgagggacgagtgtatgccttatttggagagatggccaatacttgggaaatctcaatgcattcatgttccacgcatattcgtggctcgatgattcctcgatgaacatgtattggccagtgttctggaaattctatgacaaaagcaaattggggtttgggtataatgaaaagagccagagcgtagagagaacatcacgactaggaaaaggaaatcgagagtaccacgtatggtaatggagcagaatgctttactcctgcaatagaagaatctctgtaaaaagcgatttccagttagccactgatccccaacaacacaacagacaccaaaacctaccagtcaaagcttcttcaaagcttagggtgatatacccatcccgatcatcatcataccgcttgaacacatccgtcatacgcttcagactgatacaagcctgaacgaaaagatcaaagctcataccagtagacctgtagtccttaggcgcattgctcatctgcttagccttggcttcaaagacaccaaagataacagaaatgaacttcccgctaagacgatatccgaacgcaacaagcgcgttctcgaactcccgctggctgatgcgtccactgcggtcttcgtcaaagcgatcgaacagctcccgccatgcagccagataccgccacagtgagacaaactcgtcgaagttgatggtcccactgccgtcgcggtcgaacatccggatcatcagcctgaccgtccgcgggtggaaggacgtgtagtcgccgttcacgagcgcgctgccgagctccccttcggtgagggtgccggtgtgggacgcgttcgcggcgcggaagagggggaagagttgttgcgggtcatcgctgggtgctgtcaatggcggtggggcgggcgattggggaggccgcgatgagggcgggggtcggttgcgctgggggtgtactggtggggggccgaacccgtagttctggggtggcggggaggggtggagggggtgaggacgagactgggactggctgaagtgttgacttggcgggggcgcgtttgttgccgaggggcggccgctgtaggagttggagtgggagtgggagtggtaaggctgggaatcaaggcgtggaggcgcggaggcgtatgcgtgctggggagcgctagagctggatacaggaacacgtggagggacaccgctgtgggttccttgcggtgacgggcgagatgggagcggtttttgggtgtgactcggagtgtggcctgatacactcatgttgcttaacatctgcgccgcctaattgagggttaacgaaaggagtctaaggcgtgtaacagatgttgtacctcttctggctcagcatgactaatatttcccaagtcagtaatcagtagctgcagaagatgcctagagtatgcacttacgctggcagcgcgtcggggttgtaggatttgttgtaggccatagtcggagcgctggaggtgacacaatcaagagaaagaatgcgacacaggaagtgcaaaggtatatgaagaagaagaagaataaaaggaggcacctgaaagcggagccgggggggggcattgatttttagcgcatgtgaggaaccttgtcggaggaactgcggagggtacatgacgaattgagagctacatattggtttagagggtttatactgtcgagtttatgaatatttttagtatatgagatagctagagacacctacatataagcagactgtttctattgattttgttcaatataggtccatggatttgccaggaagaaccttggaatacctgcttcactatgaggctctgctttaaaattaacaaaaacatatccaaactacggagtacatgaatctatcgaattaacgcccctagatccacctagccagcgctatgttagaactaatacgaatacgagtttcgagaagtgcgtggtttctattccggacccctcaatatacagcgcagaactcgaatccccgcgctaatacgtatagtacgggtgtaccgcttgcattgtaggtttggatagtattagagagacgagtctacaaatttcaggggcgaaatacgcgacgtaactgagattggaagaggctgagttgtgtgcccaacttgaacgccccgctccactctatggcgtacggagtacagatatccaccgcgttcacttaaccactacagaccttcaatgacagcatgctctcgcttgacggcacgctataatggatcctacttcaatgatgtcactttttgctatcacgagatagctctttatagtgcgctttcctaatgtagaacaggctaaagcgagatgggacttcggaaatttggaatttaagagaccaatgagagctaaccacttctagatatataatctatgacttctcttctcattgacttatgtgatgtgtatattatactggatataattcagttgcgggtcattgcctatatctgactacgactgctgtatattctatattgtaaacaggaagtaagcttgaaagatttcatttctcatttctcagttaacgttagcagggtatctcaaaggcaagaacgcttgatattctgcaaaaatgcgctaggcgcatgaacaaaccactcctcggtcgaacctcgttggcttgtcgtcggcgtcgtgaaatttaaacgccctggtacaggccacgagcgacgagggacacctccggtgcttgctcctcgagcacggcgatgatctcctcccaagccttctcctggagttcctcgccctctaggatagtagtcagcgcagtcgactcactataaaatcattagcaatggtcaattgaaacagggtgaaagatgatcttactcaagatatccctcactgcgccagcatttcccctgcgtttcgaggccctggagggtagcactgaccagcgaacggcttccctgctcagtagtacgggcgaaaaacgtgtgcataacccaaacgatacacttctcccaccaatgagaatacttgcgacccaaagccgagatgcacagtccggggctgacagtgttgacaaccagagtgtgagtgccgtcgtcgttgcacacgatattggcgattttcttgatcacgatttcgagcagaagcttcgaaatgccgtactgcttgggaccgttgaagttgtccgggtcgttgacgtgagcgaggatcgagccatcggtctggatgcttgcgggcttgacgcgaacgaattgctggctggaaacgagagttaggtgggtggggttatcgacgtaggagcttttctttagcttaggaagtagaagtatggccaacatcaaggtcgacagggtgttgacctgtagggtctcctcccagccctcgggggactgatagtattcgcgattccaaagtccagcgttaagcaacgcgacgtcaacacggtccaactcgacatggacgcgttcggcgaagtctttgacgctctggaagctgttcatctcgagctgccacactttgactacgttgcgtcggttcgtggctcgttcgaggtcaactttggccttgttgcccttttcgatgctgcgagatccgataatgagcaactcgacgccgagattgaggattttgatggctgcttcaaagccaaggccagaagtggcacctgtcaaaatgacgatcttaccagcgaaggacgcaccttgaggatcaaggggaggagtgtactgcatcttgaggaggcgaaagatggccgccatgatggaaattgggatgcaaaaggatggaagaataaatcaaagtaaacaaagtaccaagggtgcgaggcgcgtgatgaatgttttggggaagaaaaaaagccgataacaccagggccgataaaggatagcgataaagataagagataaggatacgattagtgcagatctaccaaggtacgaaagcggtgtataactatatccgtacacggacctcactgtaacatgtcaaataataggagtatgaataactgcagatcattttgccgagtatggttcgcctcttttgtgttgacccttaccatagtgcagatcatagacgccaaccttggaagatgaacaggaataacatgtcaccatttggactgttcattcggatccccaggaacttctcatatcgagcgatatcgagcgatatcgcgaggatgtttgagtcagcaagaatactagcaatgacggcaattctggacgcaatcttagataagatgtgtcggtgttcatgaaaatggaaccgacgatatagcacgaagatagaagcgagaagcactcgaggaactcgagttgacgttgcaacagacgcagtcgtttcggcatcgtgatattcccggacagagggcatgctcagcgtgccatctatcgcaatgccaatatctgtgctttcagaatcctatcctggtgattgattgtcttgatggccatagcatttgtgatattgaaattgttccaactgagctatatgatatcagaacattcaaggcacaggagtgagcccagcgagatcaaatcccattccagtgatgatatcgcggagagaagtgatgtcaaagctaaggcgatcagtgccctggcggctcgggtcaaccacgccgtcaaaaatgtcttctatggtcagcgaaataggcatttccaccgggccccgaaccaggaaaacctggttattccaggtcatttgtgccttgcccgtggcatttcggcatcagagttcgattgtactgcacactcctctcttacgctggaagaatctgataagaatgaccttgcgtacattgataccaacgccctctagccgaaatttcgcatcctataacaggcttgagtaggtttggttgaaaccaacctctatgaccacggttggttgatgggttgtcatagggaatgatgaatgtgttcggtttttttgatctccaaaataatttgaaatttttagaacttctttatgatgaactctttctggacacatgtgtatttgatcaagaagcgtaagaaggcaatttccaacctcctcggccacggaggttgagacaaggacgagtaaagtgactgggtgaagaatccaccagcttcaatggtactcaatgcctggtctgcttttttcttcagggtccttggccgaggtccacatcatcctcggtatcagaaccagactgatggactgaatttgcacccttagcaattcgtgggtgatgcttcaagagtggtgagaaggacaaggagaaggagaaagtgcgatgtcagcatatataatagctagctaccacgtgacccccaggataatatcatcatcttccctactatccctaggtaccagcgtaatagatatctcaaaaagcatctaaatagaccatcagattgatatgagaaggctattcttgtttactacgtgaaccagaagttaaagatgcaaaagataaggtagaatcaaagtgagccgatataccaagtccctgaagatatttcctctactctatatatagaccatctcacttgtatcgcatttgtacctcactggtacgttacatgtatctcaaatgttgtgctttgaaagtgttaagatgcctcatccatcacgcagatggcgagatgcccaagaacaaacaatgcaaacaaaatcagtgtataatcagtcttgggcaacttcaacattcagaacgttcacaattgtggtcaaatccaatttataacagcatcttctttagcaaagaattcaagtctctggttttcttttctgaagttgacgcgctgatcacagaaatcagccttaaagctgttgccggagcacattattaatccacctccgccagggcttggaaggtcggaatccgcagccaataaactcgttggagcgcatttaatatcgtctatttgatatggctgccattgcacaaggccatcaggtccatccggacggtcgcacgtggaagagtcattttcctaagggtgatctttgggtatttggttatgggtgggttaactcattgtttcgaagttccattgagccgtcaaatatcaaatactgattatgattataggagcttgatctggaaaccgcctccacactatggtacgtgagactggaatgtaaaagtgcggcactaaaacgaaacatcgtgttggttgcttttgaccaagaatcaattgactaattataccatctagaccagcgtgtaccgggctatattaatggctatgttcggcgtttctggcaggtacgtgaacccgtcatttgaatgggagactttatatttgtacattcaagataaccagactaacattgtggttttccatcaattctaggccaggtatgtcgttgactatgtgcaatatgcagacatcgcaatgtaaacatgccgagaaccacaaatcgctaacttgatctcaaagtaccgatcaccgtggcacccccgagcaaccgggccgagtagtcaccgtaatcgagcgaagcttctgggaaaccctgaacgatccggtatgttttacatacgcctcttgttcatacactcattgatataacccctagctcgcccacctagaatctgaagctgcctccacaggcaaagtctggggtgcggcgtatcacatccctgcatctcatgccgaagaagtccatgactacctcgacgaacgggagatcgacgggtacagtgcgcactatacgccattccacccgaccgtggatgtcgaaggagccgcaggatcgaccgggccctctccaatcatttgcatggtctacatcggccagccgactaacccgcagttcctgcgtgaagcagctcagcgcgagccgcagaatgtggcgcaggttatcagtgctgggcatgggttgagcggcaagggttctgagtatttgttcttgttggagaaggctcttgagggtcttgggcttgggactgcggatgttcatgttacggatttggttaagagggttaaggctattgaggctgaggggcttgcggatgctgaggagaaggaggctggactgaaggttaccaggtctttggagggcgagggtgatgagtctgatcgtgagaatagccattgattgaggtgcatgggtcaaggctttgttggtgacttttgaagttttttgtttgcacatatataggttacatatttgcctagcacaatagatagatagcgaaagaagcgactggatagatgacatgggttctttttcctaaatataggggggggggggggggggggggtttgggtatattttnnnnnnnnnnnnnnnnnnnnnnnnnnnnnnnnnnnnnnnnnnnnnnnnnnnnnnnnnnnnnnnnnnnnnnnnnnnnnnnnnnnnnnnnnnnnnnnnnnnnnnnnnnnnnnnnnnnnnnnnnnnnnnnnnnnnnnnnnnnnnnnnnnnnnnnnnnnnnnnnnnnnnnnnnnnnnnnnnnnnnnnnnnnnnnnnnnnnnnnnnnnnnnnnnnnnnnnnnnnnnnnnnnnnnnnnnnnnnnnnnnnnnnnnnnnnnnnnnnnnnnnnnnnnnnnnnnnnnnnnnnnnnnnnnnnnnnnnnnnnnnnnnnnnnnnnnnnnnnnnnnnnnnnnnnnnnnnnnnnnnnnnnnnnnnnnnnnnnnnnnnnnnnnnnnnnnnnnnnnnnnnnnnnnnnnnnnnnnnnnnnnnnnnnnnnnnnnnnnnnnnnnnnnnnnnnnnnnnnnnnnnnnnnnnnnnnnnnnnnnnnnnnnnnnnnnnnnnnnnnnnnnnnnnnnnnnnnnnnnnnnnnnnnnnnnnnnnnnnnnnnnnnnnnnnnnnnnnnnnnnnnnnnnnnnnnnnnnnnnnnnnnnnnnnnnnnnnnnnnnnnnnnnnnnnnnnnnnnnnnnnnnnnnnnnnnnnnnnnnnnnnnnnnnnnnnnnnnnnnnnnnnnnnnnnnnnnnnnnnnnnnnnnnnnnnnnnnnnnnnnnnnnnnnnnnnnnnnnnnnnnnnnnnnnnnnnnnnnnnnnnnnnnnnnnnnnnnnnnnnnnnnnnnnnnnnnnnnnnnnnnnnnnnnnnnnnnnnnnnnnnnnnnnnnnnnnnnnnnnnnnnnnnnnnnnnnnnnnnnnnnnnnnnnnnnnnnnnnnnnnnnnnnnnnnnnnnnnnnnnnnnnnnnnnnnnnnnnnnnnnnnnnnnnnnnnnnnnnnnnnnnnnnnnnnnnnnnnnnnnnnnnnnnnnnnnnnnnnnnnnnnnnnnnnnnnnnnnnnnnnnnnnnnnnnnnnnnnnnnnnnnnnnnnnnnnnnnnnnnnnnnnnnnnnnnnnnnnnnnnnnnnnnnnnnnnnnnnnnnnnnnnnnnnnnnnnnnnnnnnnnnnnnnnnnnnnnnnnnnnnnnnnnnnnnnnnnnnnnnnnnnnnnnnnnnnnnnnnnnnnnnnnnnnnnnnnnnnnnnnnnnnnnnnnnnnnnnnnnnnnnnnnnnnnnnnnnnnnnnnnnnnnnnnnnnnnnnnnnnnnnnnnnnnnnnnnnnnnnnnnnnnnnnnnnnnnnnnnnnnnnnnnnnnnnnnnnnnnnnnnnnnnnnnnnnnnnnnnnnnnnnnnnnnnnnnnnnnnnnnnnnnnnnnnnnnnnnnnnnnnnnnnnnnnnnnnnnnnnnnnnnnnnnnnnnnnnnnnnnnnnnnnnnnnnnnnnnnnnnnnnnnnnnnnnnnnnnnnnnnnnnnnnnnnnnnnnnnnnnnnnnnnnnnnnnnnnnnnnnnnnnnnnnnnnnnnnnnnnnnnnnnnnnnnnnnnnnnnnnnnnnnnnnnnnnnnnnnnnnnnnnnnnnnnnnnnnnnnnnnnnnnnnnnnnnnnnnnnnnnnnnnnnnnnnnnnnnnnnnnnnnnnnnnnnnnnnnnnnnnnnnnnnnnnnnnnnnnnnnnnnnnnnnnnnnnnnnnnnnnnnnnnnnnnnnnnnnnnnnnnnnnnnnnnnnnnnnnnnnnnnnnnnnnnnnnnnnnnnnnnnnnnnnnnnnnnnnnnnnnnnnnnnnnnnnnnnnnnnnnnnnnnnnnnnnnnnnnnnnnnnnnnnnnnnnnnnnnnnnnnnnnnnnnnnnnnnnnnnnnnnnnnnnnnnnnnnnnnnnnnnnnnnnnnnnnnnnnnnnnnnnnnnnnnnnnnnnnnnnnnnnnnnnnnnnnnnnnnnnnnnnnnnnnnnnnnnnnnnnnnnnnnnnnnnnnnnnnnnnnnnnnnnnnnnnnnnnnnnnnnnnnnnnnnnnnnnnnnnnnnnnnnnnnnnnnnnnnnnnnnnnnnnnnnnnnnnnnnnnnnnnnnnnnnnnnnnnnnnnnnnnnnnnnnnnnnnnnnnnnnnnnnnnnnnnnnnnnnnnnnnnnnnnnnnnnnnnnnnnnnnnnnnnnnnnnnnnnnnnnnnnnnnnnnnnnnnnnnnnnnnnnnnnnnnnnnnnnnnnnnnnnnnnnnnnnnnnnnnnnnnnnnnnnnnnnnnnnnnnnnnnnnnnnnnnnnnnnnnnnnnnnnnnnnnnnnnnnnnnnnnnnnnnnnnnnnnnnnnnnnnnnnnnnnnnnnnnnnnnnnnnnnnnnnnnnnnnnnnnnnnnnnnnnnnnnnnnnnnnnnnnnnnnnnnnnnnnnnnnnnnnnnnnnnnnnnnnnnnnnnnnnnnnnnnnnnnnnnnnnnnnnnnnnnnnnnnnnnnnnnnnnnnnnnnnnnnnnnnnnnnnnnnnnnnnnnnnnnnnnnnnnnnnnnnnnnnnnnnnnnnnnnnnnnnnnnnnnnnnnnnnnnnnnnnnnnnnnnnnnnnnnnnnnnnnnnnnnnnnnnnnnnnnnnnnnnnnnnnnnnnnnnnnnnnnnnnnnnnnnnnnnnnnnnnnnnnnnnnnnnnnnnnnnnnnnnnnnnnnnnnnnnnnnnnnnnnnnnnnnnnnnnnnnnnnnnnnnnnnnnnnnnnnnnnnnnnnnnnnnnnnnnnnnnnnnnnnnnnnnnnnnnnnnnnnnnnnnnnnnnnnnnnnnnnnnnnnnnnnnnnnnnnnnnnnnnnnnnnnnnnnnnnnnnnnnnnnnggcgggggggggggggtagtgggctttggtataattctggttttgtccgatcttgttattgagtacattgaggctactattgcctgggcgggaataactgtttccataaagcaagggtgcccaacgggaattatttcgcatgtgtaaatggtcgcccaaaaaatggaacattgagtagtattagcaggcgatgtctgaatttgttccccggaaaaaacctcgtggttgtaatacatagttcagtccgatacccgtgacccttgctggacatacatgccatcgaatcactacccttgatctatgtactctgtcataggaaggatctgccgtgaaacgaaaataggcattgcagatatgaaaccacacaaagagagaaagaagacatcaaaagttcgtaggtgaaacaagtcgaaacgcaaccgtataaaagctcaaatctgcgttcattaaacaaattctcaaataataaacccatattcccttcctaagaagtcgagcgcgaaggaaaataacaatatcctgtaacaaaattcaatgggcaggaccccgccgtttcatctttcgccatattcgtttgtagatcgttacttcttttggaaagatttgccaaagaaaagcgcgtatgaagaaatcgaaaagaccccatcagctaatggtaaccctcttgaggagcctgctcgtggatgtttccgcgccaacctttggatgtcagttaatatcaggatcaagataccacaataactcacctccaccaccgccatacccagagtttgggccaccacctataattaattagcaaagcaacaagaaagaagaatcaaaaactaaccatagccgccgggaccagctacgccataaccagcgggaccgctaggagcgtagttgctgtacccacggttgtagggcccaccgtatccaccggcagcggcaggaccgttattgtacccgccgtgattgtgattgtagccaccgtaaacaccaccaccaccaccaccgtggtaactagattgaggctgggcattgtatcctccacgaccgtggaagccagcatcctggcgttgtgggcgatcaaacgccttgtcaacgcgaatgacccgcccgtcgaatctgaacaacatatgagatcttgaactcataaaatcaatgtgaggttggatggttactcttggttgttcatagcgcccatagcagcatccgcctcggcgtcagtagcaaagcgaacaaagccgaagccgcggctgcgcaaagtcgcacggtctttcacgacaatctgtactcatggtcagtagaagcccaagatgcatgtggtgtacatcagtcaagggagactgacggcttcttgaatctcgccgaatggttggaaaccctcgcgcaaggtgtcatcgctagtatgccaagaaaggccactaaatcccatcgcagcaacggttagactggctcctaccagcacaaatgtgttctcaggtatatatacacactgaataaaaagtttagacatcgtgttagaggtgtaagagaggaagctgtaagagagacgatgctcgagctggcttgatctgaggacggagatgaatgttgaaaaaaaggagacgaccgaaagaaaaggaaggataaaaatatgaacccgtccgaattgtgagacgacagggagatcctagcggctaagaggcgagtcagcatccagtcccgtgtaacaatcacactgcgttagggcttgcacattgccggggattttccactggtcggacgccaacggcaaagtccacaacgagtaatatctatttatgcgtactctgtgctgtgtctttgtctggaatcatgactagagcgagaaaggtccgggcttagcctcaagcgtacttccaagtgggggagggatgctgcagagataaacacgccaaagccagtctcacggccctaaaccttgagctgatacaattgcgggtcgtcgggtttccagcagtcaatcagatggtatccgatgctccgtttggattggcggcacttagggcaacggcttatgtacctttgttgcccctcacttggttgaagatccgagggattctgctttgggattcatagggctggactagcacctagattctattgtgaatctatgtactccatactgagtacatagttagtccatccttcttgctccgagaaccgggatatgagtccattgatgaaagcaacataatttcgggtggagtcttcacgcgtggactgtggaattttgtcgattccccgtagcttgctccatgcctgattggtcgtatgcgtgtttatgcattgtggacttttgtcctcattcggtcgggaatcatttgaggagtgtttggcaatacagacttgagatctgcattcaattaccaccgtggatctagcctctcagttcgggccatcgtcagtctcaaagtggctttgcgcgcgcgtgcatcgggcagagagggcagtgctccgtaggcccacatgcggcttgggccgtcggccttgtacttcatgtgccgggagagatcgcaaatggcgacgatcggcactgggattgcgtctatacgatgttgacatccgtctccgataggttgatgaaggtaggtatgggagaaaagtaccgaaaatgtttgaacaaaagctattcataggtgactcaaggaacacttctcatttaagcgccgagagagagcattaaagagcaataaatgggcattaatagaaaaacaaggaaaaacgaggaaacaatgaaaagacaggaggacgaacttgagatggtcgcgctttcttcggcggtgacttggatttgtgtgctttcaggtcaccttactctgtccagttgcttcaagtctactttatttctacaaacactacccagctctctgagttctgggaactttcttgatggaaagcaataatccaatctatcattggctttccactgttgcgagccagcaacaaagtcgccatcaagatggaggcatgttgttgtcacaaagaactatgaagtctccgcgctaacatagctttagctgagaacaaggaacaagcgaaggacacagctcctgtaacgagcataccgcaaacccgcatcccattcgagatatccgataatttgcgtgtgaatggacattcagccagtaggaagagagattcaggccacaagggaacgaaagcaccgtctactcacgagaccataccacgaagtgagagtcataagagatcacgacatagctacgagataaggcccagacacaagactcgtgaggatcgctatgagtataaaggcccatcatcggctgtggagacccagtcgcagtctcgcaaaggaagaactaggaaatcccagggcaggaagcacaccatcaatgatgacttccatgccatcaatattacaggaaacagattgacagtaagtattgttctgcaacttctcgctggatgttactcatgccaaatagttgcgcaaaaacatgaacctgggtatgtttagtaagggacggtcttcgtgcataaccaaccaccccggaaatacctcgtcaagcgctcttggaagaccaccaagcatcaagcctcataagtggaccgcagaatccgatcttgccttttccgagatgaactttctgtcccggaggaataatcccagcccgtatcccatgtcgaccgccagagacactctggatggacagaacgggagagagcaccacccacgagagctacagttcgcttaccctgcacatgactctagaatcaacaggtctcacttaggcaaccggtttcttgatgtggaatgccaacttgacgtcccagtcacgccgttgttcacatttgaaaaggcgccggtcagcgagatgtccgcagtttccggccactcttggggcacttcctccatgttccacaataaaagaagaaagacatcaaaacagtcatcatcaattccatacacctgggctgagactgaggtcgaccccacggaacaaagcgatgccctcgaacaacacctgctgagcctgctgcatgtcggggtatatccccaagcgctatgctctaatatcacaaatactgtctcggggagacggtattggagtctcgctgaattatgggaattgttgaaggagagaaaggcatcatggtcaaacgaagccggcaacaaaaagcgaacttcacccgaagccaacatggggcaggtagctgcatccgaagccgttccacaggagattcccgagatcgttgcatcagacacattggatcttgccaatgtcagcagtgtacaaaatgaaatatccgaacaatccccagattcgaatgtcgcttgtgaaacggtccgcagtgtgaataacagaccacaacaacaacctccaattctcgagcaacaacaagaccgaccatgtcaagcttcagatagaccggactgtctaaaccaccaagttgccatgatatcaaacatcccagatcgatccatagatatctggggtgaagatcagtgcgagcctttctctcacgaatcgggagagcatgcagtattgtttcccgcatttgcaccggaggtcaaacagccgcatatatctgacattgaattttatgagctagatcgagttgatgatgatgatgagttctatcgcacgctggatgctgcttactgcgccatcgttcgccctgaggttgcggcaggagttgcatcaaacttacagcggtcacttgaatcccccgaacttggcaataatattccgaatagtccagaatcgactggcattcgagactatgatattcctacccgacaagcagaagcaggagaactagaacatctcgcaacggtctcccaggatatcatagaagagcggtatgatgagtggccagcgaagccttctcatcaaaacaaaccacccacgagtcattcgaactatcctggtgttgacccaaacaatgatatgccatggctcactactggatacggcaagccactaactgggaacgacgcgcaacagagtcagcacccagaaatacctgacttctggcgacagaacaaactctactgatcttcaccggcaaggtggttattaactggatagtcgaacgtgtcaatagcaagcttggccacatttgcatcaatcaaccatatcaaagcgaagtagcgccatcttcatgtacatacctcgctagcttgagttcggccgggaatagagattgtgagcaccttgaattcaagatagcattagggtaaccccccctccggacttgtatgatcagaccacacatgtattgtagtaacaaaacacattcccattgtcagacagaaattccagtatcgtgaagcccgaagcattcctacttcaaacgttccgaaattggcttcatggctccttcccaaaccttggaagttccccgtgtaaacaaagaaggcaaacaatgtaaactggaaggtgtgacattgatattgacagggcaggtgcacgagggacctgtcgcactccaggaaggcacgtgggtttggaatataaaaggacccttccccccatttctcttcttctcttcttcttctctcctccccatctctctggccaccatctctccgtccaccccccctcccctccccctccccttcccctcnnnnnnnnnnnnnnnnnnnnnnnnnnnnnnnnnnnnnnnnnnnnnnnnnnnnnnnnnnnnnnnnnnnnnnnnnnnnnnnnnnnnnnnnnnnnnnnnnnnnnnnnnnnnnnnnnnnnnnnnnnnnnnnnnnnnnnnnnnnnnnnnnnnnnnnnnnnnnnnnnnnnnnnnnnnnnnnnnnnnnnnnnnnnnnnnnnnnnnnnnnnnnnnnnnnnnnnnnnnnnnnnnnnnnnnnnnnnnnnnnnnnnnnnnnnnnnnnnnnnnnnnnnnnnnnnnnnnnnnnnnnnnnnnnnnnnnnnnnnnnnnnnnnnnnnnnnnnnnnnnnnnnnnnnnnnnnnnnnnnnnnnnnnnnnnnnnnnnnnnnnnnnnnnnnnnnctcatgctgcttaacctaccacagggatcataacattaccatgtttgttatgaggtctatgtaggtctgcatcaaataacaaaccgagctttctcgtggaagttcctgaagtcgtggctctcattgccatttgacaagtcccacggaatacatgtagatagccataaccgagttgaactcctagacttgatctctccacgtattccaatgtcttgtttgtctcacataatcgttcgcgctgaggtcctcgcagatggttctaacacgacgtgatccctctcgaacgcgtaaacaaaggtctctgctgcgctacacttgccttggtgctgaccagatgtggtgactcttctatttgtaacaataattgggctaatcgagcaaaggatttgactcaaatgcagttcagctcagtcgggttcttcaacatgccaccacaaactgccagtcaatgatttagaaagcacactggcgctggtttatgagagttgatgaattcattgggtatataacagtcttggacagagaaattgaacacatcatcagatggctcaaatccagaactttgtctctattgaagttgacctatccataaatctcactgttggacgaagaacaatcgcgaaacacgagagatcggaaacgaggtctccgtgcaacgccagatacaaccaacgcaaaagatgttgggagttgaattcgataaggcaatcttgtagcttttaagtcgtggatatgttgcggagtccacgaaaataagtcgggtcggttttgtaaagggattggaacgctgagaggtggggcggttgacaatgacacgcttgataaaaatgacatgcagcaagtgcttgcaaggcgattgggactataatctatcatagagtcgcagccgcctcgaccacacccgctgctttgaatgcgcccgggttctgcatcaccacctcaacggggaacttccactccatgaatcgcgtccaacctaaaataccagcccattagcatgttatcctctcgcacagcaagatcgggaagcttgttggtgtcacatactccaatatgcgcatcgtcgtcccaggtatttcccaaggaaaggtaccaggaccatactcagaagcagctccagttgttcaatgctttcctgccattctgcctcggcatcggatgaatattccgacaaggtatcgaggtcggagtcgtttgtagattctgaagggagagaggcgagctcatcgtcggactgggactgggagtatgaggattgtcgggagggaaccatgtacgcggacatcgagaaggagggattcgagctgtcttgagagaaagacatgatggagattgttgtaaagagaggtggggttgagtgaatgaggggaagcgatgttgatcaagcagcggcctgcctactgcggttctacgtaaacgtgagagcagcctggactgtttcccttgatcgaccggcaccgccaagctccgtaattaaacacgtgaccgtgtaatctggtgactcacttggcggtcacgtgccaataccgcgataacagaattgccttcagacctggcgatatcagattccagcgacaattttgccatctgacactcttgctctagctcctcgaattcgcaacaacctgatctcatctctaacagattgtggtggagtgaatagcatctttgaagcctacaaacatggcggacgctgtacgtcacacccttgtctttttaccgaccctcccacattttctttaagtctgcacaatatcgacccctcggccgccaaccactctgatccaagaacgcacatcgtttagccgggttcaaggactggtacttttattgaaaagccaggctatacgatttcttctgctatttctctttttactcagaactaacaccgctttttgccgctccgctcaggaactcgaaactaaacagcgcaagtcggtcgcattcagcgaaggatcggtcatcatggataccaatggccaagtcacagatgctcctccggctgaggctcctacagccggtatgcaatagctctccgatcccagcagtcccccagtcgcctttgccacagccccactaacgatgtcttgaatatacagagaaggatgtcgacgaggtcaccgagatgttcaagggtctctcaaaaaagaagaagtcctccaagaagtctaagaccaccgaagccggcgatgacgacgaagcccccgccgccgccgacggcgagttcgatccctctgcgctgaagaagaaaaagaagggcagcagcaagtctaagaaggccgaccccaacgacttcgatgccaagctcgctgaggctggtattgctgaggaggctggcgaggatcagcccgaggagctccccgagggcgaccttgaggccggcaccggtatctgggctcacgacgccacacaacccatcccctactcgctcctcgtctcccgcttcttctccctcatcgagagccaccaccccgaccttctgtccagcggcgccaagtcctacaagattcccccgccccagtgccttcgtgaaggtaaccgtcgtaccattttcgccaacattgccgatatctgcaagcgcatgaagcgaaggttcgctatctcccacctatgtactcgttgaaatttcgtttaacaattttttttaaatagcgaggagcactgcacccaattcctgttcgccgaactcggtacgtcaggcagtgtcgacggtagccgtcgcctggtcatcaagggaagattccaacagaagggtatcgaatcggttctgcgtcgctatattgttgagtacgtcacatgcaagacgtgccgcagccccgacaccgagctcaacaagggagagaaccgtctgtatttcgttacttgcaactcctgcgggtcccgtcgttccgtcgccgccatcaagaccggtttccggtcccagatcggccgcagaaagcgtgtgggctaagcggtggagctgtgctggcaatgtgcgaaggaagggcttgttttatctcttccttatggcgtgtcacttactagagcttttgcggggtggaaacaaggcatgatgcgtttctttctgccctgagaggcttgagatgaggaaacgatttgaagaatgaaaagtagtttcgcatggaatagactgatatcactatgtcttgccttcgaggctgtatgattttgtatctagttgaacgttaggaatgtggtagaatcgcccactcttaaatttctttcttttgccttttaagccttcggtcccacgagtctgatctgctccacggggtactaattagcaagcacttgcctattttaagtctcaagctcaacatcttaaagagatatcggatactttgtttatggcccttcctatggagtaccaaggataggctcgtaggtgtgtagtatatcaaattcatttataattgtggtgatatcgctgcaaaaattcgtaaatagttccacataaatgtactgagcaaaattggtataaaatggagagcagcccgtgattgagcatatgcccggtgcaatgaagaagtatacaacaaaaccacatgatgacaacaagccagggggcatcttcgtttgttccgaaagtagatgtcaacgtataaaattcacaaaccggtctcttctgaccgaatcggcatggtagaattaaccacccttcgcagcactcaacttcatctgggcagaaaaggcattcaggtttctggtctgtaggtagacagttccaggccccgtaaacctgcaagcaagaccctcgccagaggtaacgccggagacgataccgccagaggccacacgttccatcttgtacttgcagtcccaagccacaaggtggccattgtcgacgaagtagctcatgccttcatcaagctttgcaggtgtcagataaaacccccgttgtcaaattaccgggcatgatcaacttacatctttccggatgattgcaccaaaactttgcatccaaaggatcccacttcctgtgatcttgtagatgaagaatccctcaccggagaacatacccttggatagaccttgggactggtgcttatgcccgataccagcggtatatccaagcaaggcgtcgcgtccgattttccattcctttggttcgtctacgtggagggctataatatctcccagcatggaaggtgccagcaggagctcaccaggaccggtgtagtgggacatagtcatgctgcccccaatgaggagtttcttccatgagaacgagatagttcccctcaatgtgatcgttgtagacattccaatcatggcacctaagaggcaagcaagattagctctatggcaatacatactcgggacgaagatatcgattacagcatattcgcgtacaggaattgttgaactggataacttaccaggtctgatattcaaaggacagcccattgccagctgtacggtcaagacagagttgctatctcggtggctgatcctgtaacttccaccattgaagactccagtatcatcttggttcattccacctgtcccagtgagttctccatgttctgaagcatgttctggggttcctccagacactgtttgcattgcaatggcatgattttgttcgaaagccgcttgattgtaggcgattggatcttgctgaggtggactcactggctgccttccaatagtgttattgtaattgaaggctgcttggttgtaggcgattggatcttgctgaggcggactcactggctgccttccaatagtgttattgtaattgaaagcggcttggttgtaggcgattgggtcctggggcgggctcgccgacgtcggaggggctgcatattccctacttggggtttgtcgatggggttgggggctctctgctggtggagtggctggggtatatactccatttgaaggctgctttggcggtggtggatagtagggagccgcaagcgattgtgaaaatgctaaaatatttagtaagatagcaaagacagaagaatcggattaattacaggttatatgcgccggagctagacaattagttagtaacggatttctgtagtttgtaactttgtgaaggcactcacctgtcatgggtggtggggcataatagcttgaatcttgagacattgtggtggttttgatgtcgctgaacaccaatgtctttttattctcttagaaaagtacttctagagtcaaaatccgagtgttcacaggcaaatgaagacactagggaagtcagactcgctaatatcgtcacagcaaaaactcgtagttcctcccgtattattttgcgtcaatgggaagaataatgggtatctcaatggcctggcttgatttagggaataataacaagggaaataaaaccagaccggactctacggggttttctcttttaaaggggagctagcttttcccctcaccaacagctcatactattactattcttagagaggaattccactaagagattaggcgtgtgatgaggcttgcagctcgcagtcaatcagtctcgagtcacacgcaattgtgactatgtgccaccgatcttccccaccgggcgctaaaaagaagttgcatgtgcgagagttgataggcgtgtcctatgcatgctatttaccggggatagctcattcgtcggaattatatatgcaataggccgtacatttataagtctaggtaccaagagcgacagaaaccttgcccagggctgggcaaatatgaggggttgatcggcactttgtattagcgaactcgaagccgaatagttacggagtacagaataatgcgaagaggtaacaactattaggcattatggacaagattgatacaaagcaatgttgaatttttctgctacatacaaattcctagaactaaaggtatataaggtatatatatctcacggctccttggtccccccttcagatacctggcgtaaaaaggacagtgccttagtataaccggtttgcagggcgtaatccaaagccgttttcccttgatcatcccgcaagtcaagcctggctccgttatccacgagcaactggagcatcggaatcggattcattgcaggggtagcgagtcgaagtgcattgttgcctccggcatctcgagcattgacgttcgctccttctttgatcagcaactcagccatctgaagctggttcttcatggcgactgataggagcggtgttctttggccagacccctcaatatctgcgccatgggataatagcagccggacagtatcgagactattcttttcgcatgcccaatgtaggggagtgtggccgacctcgtctagaatatcaatgtttgctccgtgctgtagaagtaatgcgacaatatcgtcctggccttcatgagcagcaattgcaagtggactgatccccgagtgttgcgctgtaatgtttgggttggctccattttgcagtagcagtcgagttccctcgagatcatgggtggaaacgagatcacttaacgcggaacaattgtttggatctatcatatcaatatctgcgccctgtcggcgaagtatgtcaagtgctcgttgagacctaatccgggctgcaaaactgtaccccatcctaacaagcataggaaggtcttcataaagctccacccatcgcagcagaaggaaatacaataaagcatggaagttgttcctgaccagccattcaaggcatgcttgttcatcctccccgtctccttcgcggtcaatgtcatcgagcttatacaacgtgagccaatctttcagtgcgtgaatcgccccttcgattttgtctgggtcttggttttgatcgtttgacccctgtagatcttccgttacattcagtgatctcaaaatgggtttgcagtattccattcctggaacattcgcagaaaggttccacgcaatccacccaagctgacgtgagaacgagttccaccattcgatacgatcatcggatacggactgttgtaagggtggcacatggttgtggacttgaaggaattcagctctgatgtcagacgtgagaagctcacatgtctgttcgaatcctattttgcgaacatctttgttgctgtccgaaagtgcccggcggcaaagaaaccccagttcatggactgatctctcaaactgggaatcgtctgatcgctggcaaatccaacggacaagcgtaaaggcacctttccaatcacctttctcgatcaaccgctccctgcgcgccctgaccttggttgagtctgcagcgagatctggtaagagatgccgatacctgaggacgggaacaatgcatagcagtgcatcctctcttgagcccaatttgctgttctcaaagcaacgtatgagatcatcaatgcgggtactagatgctaaaaatgaattttgcaattcgggaataacatcaacgtccccgcccagatcatccaagttgaggaagacctccttgaggaattgaatgtagatatcctgggctaccatagcctcgagctcattatctgtcctgacagccaggactttcccatcatagggaaggctcttgggctcgaaactgaacaggcgtgatgaattatcatatccttcagatggtactagtctcgcttccgtttgcctgaagatccatttgtaaaagtagaggaatgtttcatctttttttgcctcatcttcactcaatccaatgaggcggcaaagagttgagttctgccagttttcatctgacttataaagtgaccaagtccacaagcctagaaccgcttctagctcggcgacatccagtttccactgcagagcatcaccgcttcggatgagaccaattgaatacgttcccggagcttcagtgacagagcctggagagggtcccttgcacttaaagccaagtcggaactcaaaggtctttccgaggttaactccccaactcgacattagatccatcgtcgactcgatcgtctctgcgaggttggaggcaattcggcgaataggcattccattccagtcaacacccaggctttgtcttgagctagtcgtgagcctcgcgagctgggttctggtgtggattaattgtttggccagaggtgttccaagatggggcgtgaatctctgtgaaggcatatttggtggccgatctgggatcgaggcgagttcaaatgactctactttctcaagataaaatgcaaaacaatctatctcttgctgcttgtgagacgtgagttcccggtcgtctttcatcttattttcatctggcttcattctttccgtgcgcagacaggtacgtataatagccattaggaatgttgatcccagttgggctagggtgacagatgaatggagacctctcagtccgacgaactgacatatgaatcccaaaattgtcgatatgagggtagagtaagtctccaaatacttcctgtcaaatcttcgatctctgatcgatttggtatagcggagtttgtccgtcattgaagactctggcccttcattgacggccaagaaagcattaaagacctggtcacccacgtcttgattaccgggctgcagccagtatatcttgcttggcttttctgctttgagatagaactcctttgaggaacgttccatgatgaatgcgcagaagaacattccgagaaacagaagggttgtcccgattatatagagcgggaatgcgtatggagcgacagctttatcgtttttctggaaatgctgaggatacacaaacaccgtgagtgtagcaaaaacaacagtgcctttttggatcgtcagcatcatttcaggctcaagggaggagaagcactgaccagtctgcagtataccaccaagtattgcagcacaatgaaaccaaaattgatctctccttttgattcccttgttcaatgacagattaggcatgtccagttcaggcaagtcagtaggtgaaactttgctattgcaagaccaagccttttcttcaagagcatctctcaaagtgccaatcttcgtctccttttctccggtgatcttgtctacatcctcccaagcaactatctccacgatcttgggccggccaaagactcgtgtaatgccgccatcgttgaaaacctccgcagtggactccgagacacaaggaagcagctcgctttcagcttcagcaggaccttcttgtgctcgtccgacaaatgccctgagggaagaacttccacagaccctgatcaccgacacgacggcagtcaaaacccctagtggtgaaagggcgaatattacattatcaagagtgcttatggactcggagaggaattgtttcgtaagtcgttcgccgaacaaggtgatcaaaggagccttgaagataaacatcagcacatccacttgaggcctcaatataaacataaacataccaagtccgtagcaagattattcgtgaaatcatcccaatcatcatcagccttgacaaaaggtaacaaggatagtaaaaacagtatagaaagaatcatagaaaacatcataaatcatcaacatcaacacatcaattcgtaataaaatagattataaaacagcactcagagaataccctccagcatggccgaaggcgcgctctcttaaagaaaacacccctccatcatcctgcgctatcgatgggcatcttttgccgatcctcactcgatttagagcgaagtacagagcccccatgcttgccccatgacaataatagaacgccaactaatgatatcaagaacactatgaacatggctttaatcttgtcggggtatgaaacacacaaggctagtgcgggcgcgtaagcgctgctgcgctggtgagtgtccccgttgtcactgcactagttgcggcccgcattgcgctatatcacggactgcgggtctggacggggcttttcttggaccggcgcgtaacttaccttgcacataggtggcttagagggttgatatggatatatataggatgtctgttatgcgggggacgttagtagcgtggaacagttcgttgtcgggatatcaatgttttcttggcgccttcagtccttattgtggcactctgggatgcgacatgtatcaaatttgggcaaagacgaggagacagacaaatctagggttgggaatatacgctcttcccctgcaatagggccggggtgtggaacatgtgtaaatcaacggaaattgtggctatggcaaccatatggtctaccttggcagggtgacgatggtggcatcattgcaggcaaatagagactttgactcttatcaaatggtggagatttcaagatattggccctgctcaagtcggattttcgtgttgtataatgaactccgtgtgatgtgaggtgaagatcgatttctctgcttatgtatattttttgattcatcaaatccaaaaaaaaaaagtgctgacaggatataaaggcaattcaatctattatgttgaatcagatggaatcagtgaatgttcacagccctgtggagttgatgtaaatgttaagtcaatgtccggggcggagcttctgagatcttggccagatgatttaggctactcgataacacccgacctcaacacccactctcccgactccccctactatcgtttctgtctacttctcttggttctaccatcgttcccttcaatacataccatccgtgtcctttcacaatggcgcccactgtcaagttcgcgtctgctatgaccacccggtcgctccgcatggtccggacggtatggctttccggcttcctgttcctgaaatgcgaccgaaacactaattccacatcatccaggaactagaattccttgccgatgcctctgtgatcactcccaaccagctctcaaccattctatcacagttgcccgccgattccgaggtctctcgggcgttgcaggcatcaccatcggagcaggcacagcctgcgcctgttcaacaagttccagtacaagcgcagccacctccagctccatacagcaacacgccctcatactcggctcccgtctcacaaatgtccaatatgtcggtgaacgagaaagccgcgctgaacaatcaatatgccagcccgccccctcaggcgccgccttcttatctccaagccccgccgctccgtctggcggtggccatgtacgaattcaaatctaccgacccgggtgacctggacctgaagccgcatgatcgtgtccagattactgaggaaataaacgcgcactgtatgttctccttctattggatatggaaacaaagctgactagtgattaatagggtggcgtggtcgcaatgagcgaactggtcaggagggtatcttccctggaagttacgtggatgaaaaagctgcgcttgcttcgcccccgccccagtctacagactatggaaacatgcctcttgcggtcagccagagtggacagcccgaaaacctcgaggacccaaagaagaacaagttcgaggaaggaggcaagaagttcggaaagaaactgggcaatgccggtacgtcttatatacttttggtactcgttatttggtttctaacttgatattagcaatcttcggtgccggtgctactgttggctccaacatcgtgaacagcatcttctaatcatgcggccgggcaattttgctgggcattttgtttcttattcactctcattgatacggtgttggtggcttgggttttgcttctaatggattggctaggctcaatcacgtcgcttattggcggacttatgtccagaaatttcaggatccccagtgttcagatcctacttagctcttcattgcgatagatcacttagggctacacacatacttacctcaaccaatgactttcctgatattttggggccacctcataattgacctagagcttgaatttcagagcaacaaagatcttacctttctagcacgcaatggaagccaaacgaaagagcataggcaatattccgttacaggcttacccccatgactctgacatgcagcaaaaaaaaaaaaaaagaggatagaaagcataagttcgggttgggaatgacattctgctttttggttattcttctacttcttgtgtgggctatagaatccagactgaacttcgagatacatgatttcatgttgttatatagaaagtatgtaaatgacaagcaacgaaaaggaacatttgaatatctatcccttatacgtgtcatcaaccagccctagagtctgaagatctaacttgtctattgatgggctacacattaatgtacaacatacgatgagcaaggaggctaagcctaacctggtgcccgatcagccccatcgtggggacctgggttgaagactcattgtgactcttgtgcttacttcggtataatatagcgtctgagaatggcgattggttattgaatgcatattctgttgctcttctcctatgatatcagtgattagggctaggaatgcgcacacaaggccgtatgacatcaagttgtgggtcaagtagcatcattgtcttgccgatggcttaaagcggactatatcagtatgttttatatacaaattaccggggatacagtactgttgaagactatataaactttccttaacctcatattgtcgataggagtcttgaatatatgaaatagtgtgtataattgcaagtagctgtggcaatgtggtgggaactgccgatgagcatagcgaactccaaagacccattgtacatagcccgtatgtacaaaatagacaaaaccctacaaactgcgaacagccatacagagctgatagaagtagcaaatgatttcaaatctaaaagagagccgagccacaacgaacaagagtaagacgcctttgacccagatacccactaggcccaatccggaatagcgcattctcccctccctcgagaagcttctgtgtcatcgatataaattgcatttctctctttaccctcacacgaccaacgtcatctctctccacgcccagctctattcctaccaaacccaaccacccaaaccaccaaatccaacctcatttcaaaatgtctgactgggaaagcaccaccaagattggcagcaagttccgcggagcaggcgctcaaccccgcgaggtcgtcgtcaagggcaagagtgccctgaacgctgcccagcgctctggcggtgtcatcaccgagaagaagtacaccaccggtaacatcgtatgtgaagtttccttcgaatccgggagaaacaccatgaatgtaggctaacccactctcaagagtgccaaggcaggcgcccccgaaggccaacacttgaccaaggtcgaccgcagcgacgacatcgtcaagcccaagaccatcggccacgccgtcgctgatgctatcaagagacgtcgcacagaggagggctacaagatgacccagaaggaactcgccaccaagtgcaacaccactatcaccattgtccaggacttcgagcgtggaaccgccgctcccgaccagaaggttctcggagccatggagcgtgtgctgaacattaagctgcgtggctcagacatcggctctgaaaagttccccaagaagaaatagacgggatttagtccgtggcctttatcccttccgggatgggaccggggcaaatctcaagttttctgcatttgctttttttgcgctctatgactgtcatgttccttctccttttcatgagacgtcactttttttttattttttttctacgggtttcttttctgctggtcggattagcgctggccttgcatgggaaacgggtttagagaagatatcacgaaaaaaaattgtataaatgagatacctcggattttgatatttatcatctggttttcttagaaacttgtagttggcatccaagtgtaaatttgaatacggagtagatggatgttgttctcatacttagcgcatcatccatgccatgcgatatatatatgcagtggggtaaatatactccttccctatacgagggactatgccaatccctgctctgctccatccagctgaactgtcagaacgtaatttgaagatttgcaaagctttgatttcgtctattgacccgatttcatctcttttgcggaggaccaggacagacataagagctcaaaaaaagaaccatgtcatctttttattaaacaaagacacaaacacaaggtaccaactccgattgatcatggaatcaatgaaatgagaaaatcgtggaccggaaggtcatcccattccgtatgcgggactcggggaatttgtcccaagtcttttcgcctcgtaaacacatacacacgacgcatcccaactttcttcaccacatcccctatttacttccgcgcttgctcccgctcgacctcgtacatgaagtcgaagtatgccttgtcaaagtggtggacacggacgtatccgtcctcaccaccggaggcgtatgcggtgcctgcggggtgaacatcgatggtgttaaggggaccgaaatggccacgaacgcggccgcattcatcttcgaacacctgagtaataagattgttagtatataagttaagtcgtttgaatgcatatttgtactcactctgtggtagaatcgtgcctcgaatttaccctggcgggcggaggtggtagtaacatccatggcggcttgaccaccacccagaatgacaaagtccttcttcggtgtcacgctagcagtgttgagaggagtgtcggaaatataggttttgaggatggcgaggttgcgggaggacaggagctgcataatattagccgggggttgcctaatagaataatctgcaaaaggaagaacgtaccttagctgacttgtctttcgacgcagtaatgaaagacaagcgatcaggcgcgaactgaatgtcagttatttggctgtcgaattcgtgaatctgcacgttctcgacttgttctccagactaaagatggtattagtatcccacattcctccaaccacctcaaaaaaacataccttaggatcatactggctgacgctgccgtcctcgtgccccgcaatgatgtacttgcccaggaaactccaccccgccacggtagccttgctctcctcacaaacgatggtcaaggtaggctcggtggcctgcgcgctaaggttttcgccgtagttgatatcgagaacggcgatagtaccattgaaacccatgcgcttttccgtcacggccaaaagtctgcttccatcgggggagaatgccacgcgcttcacggctgtcgagaactcccacaccttaacacactcgccggtcttgacgttccatagacgcacggtgttgtctgctgatccggttgcaagaagaatggtgttggggctgacgtcgactgtccagacagcaccctggtggccgttgtaggtaccgagacgctcgccgttggcggaccaccatgcgcacacaatcttatccttcgagacggagaagaggagatcgccgtcgctgttgaacttgatctgggtcagggaccgctcctgttgttatagttggctgcggtcagtctctgtggatccagcaagatttcgaggaagtcaacgcacatggccggaaagcaaaatggggcgcatttcgaagggtgaggtgataggaaattcgagatggagtatcggaggggaaaaatctgagacgctcggctcagaaggggtaaggcggagtggcttttttgggggggtcaacctcgtcaacctcactttctttgactagtgaatttcatcgcacactcggccctcaatgccaagcctttatcggaggccaacatattccgcattccggtatctacacgtgactactatctgtctaccctgagccctaactaggattcccgaaaaggttaatgcggctgagatttatttatgcctcaggcagaacaaacaaatacaatatctccggagtcacgtgctttcgggaaaccgggaaactcccggactctccgcacgagcttaattaccgaaaaaaaaagagatgaagtgaatctgagggaaatatctcaaaattgacagggctggctttaacctcagtatatctcttgagcgttgcaggtgaaaccaaggcctaattgttgatttcttctcgcaacgccggtaccaactccgcgggttcgccccaaacaagcaataattcatgccattcgtccccgctgccctaccccgctgcactttttatctccaagtgcatgggggtattctccgaaaacttcctatcctatcccgttctttgctccatacctcttcctcgatccaaggagtcagacggcttcgttcattgtccattgagtctccagtgaacgccgatttttctcttatcagctccgctatctcaccactccgaaagttttccgggtcagcaatggctgccgcgaagattgatggcactgccatcgcgaagagtattcgccaagggttgaagtccgagatcgagcagattcaagtgacgaaccccagattcaagccaaatctggttatcttccagggtaagcgtgacccgctccgagcatgaatacatgtaatgtagtgttgaatactaacatgacgattcttatctagtcggcaatcggtcggattcaagttggtttacctacgaatagtattgaagatcttgcggactaattttacttaggcacctatgtgcgcatgaagctgaaggccgcccaggaggtatgactcgttgttcgggatatccgaggcattctctgaccttattcctaggccaacatcatctgcaccgtgatcaatgttcccgaatcgagcaccgagttggagctcatccaagagatcaccaaagccaacaatgaccccgctgtccacggtatcctcgttcaattgcccgtcccaagccacatgtccgagcatgcggtcacgtcgagtgttgcagatgagaaagatgttgatggtttcggcgcaatcaatatcggcgagctggcgaagcgaggcggtcgcccgttgttcactccgtgcacccctctcgcggttatggaactactcaaggcaagcggcgtagaccccgccggtaaggaggcagtggtactgggacggagtgacatcgtcggcagtccggtcagctatttgcttaagaacgccgatgctaccgttactgtctgccactcaaagacaccggatattgcgcgcattgtcaagaccgccgacattgttgtagcggccattggccaaaccgagcttgtgaagggtgaatggttgaagcccggtgctgtagttattgatgtcggtatcaattacaagcctgatgcgactaagaagtccggtgagcgactggttggcgacgtggactttgagtctgcttcccaggtggcctcacaaatcacccccgtccccggtggtgttggtcctatgacagtggctatgttgttgaagaacgtggtgggtgccacaaagtgctacttcgagaaacagaaggaccgccacgtcactcctcttcccattcgcatactaaatcccgtgccttccgacattgctatctcgcgggcccagtaccccaagcccatcacccaggttgccaccgaggtcggcattgcccctcatgagttggagccctacggccacaccaaggccaagattagtctgagtgtgctggaacgcctctcccatcgccgcaacggaagatacatcttggtttgcggtatcacacccacccctcttggtgagggcaagtccactaccacactaggtctcactcaagcacttggtgcccacctgaaccgcatttcctttgccaacgtccgacagcccagccaaggccccacattcggcatcaagggtggtgctgctggtggaggctacagtcaggttattcctatggacgagttcaatctccacctcacgggtgacatccacgccatcaccgccgcgaacaaccttctcgctgcggctattgagactcgcatgttccacgagtccacccagaaagatgcagctctctacaagcgtcttgtccctgccagcaagggcaagcgtgaattcaagcccatcatgttccgacgtctgaagaagctgggcattgagaagaccaacccagacgatctcactgaggaggaaatcacccgctttgcccgcctagatatcgacccagagaccatcacttggcgccgtgttctcgatgtcaatgaccgtcatctacgtggtatcactgtcggccaggcccctaccgagaagggcctgtctcgtgagactggcttcgatatctccgtcgctagtgagtgcatggccattcttgccttgagtaacgatttggcggatatgcgtgagcgactgggccgtatggttgttgctacttctagaagcggcgaccccgtgacttgcgacgacattggtgccggtggtgcccttgccgccttgatgaaggatgccattaagccaaatttgatgcagagtttggaaggcactcctgtgatggtgcacgctggtccctttgccaacatcagtattggcgccagctctgccatcgccgataagcttgccctgaagcttgccggtaccgagcctgatgaggaccatgaagccaagaccggtttcgtggtcaccgaggctggcttcgacttcacaatgggtggtgagcgcttctttaacatcaagtgccgctcctctggtctggttccggacaccgtcgttattgtggctactgtccgtgcgctgaaggttcacggcggcggccccgagatcaagcccggtgcccctctgcaggaggtctaccgcaccgagaatgtggatattctccgcaagggttgtgttaacctgcggaagcacattgctaacgccaagctgtacggcgtcccggtggtggtggctatcaataagttcgacaccgataccgaggctgaaattgctgtcatcaaggaggaggcgatcgccgctggtgccgaggatgccgtccctgccaaccattgggctgagggtggagccggcgctgttgatctggccaaggctgtcataaccgccagctccaaggagaaggacttccggctcctctacgacctggatggtactatccaggagcgcatcgagcgcatcggccaggccatgtatggcgctgagaaggttgagttcagtgaattggctcagaagaaggtcgacgcctacaccaagcaaggattcgcgaacctgccgatctgtatcgccaagactcagtactcactcagtcacgacccagccctcaagggtgcccccaccggcttcactgtgcccattcgggatgtcagattggccgtgggcgctggatacctgtaagtttttatccccgcattttgtgggaattcgtcacgctaacatagctatagctacgctctggccgccgatatccagaccattcccggactacccactgcccccggctaccttaatgtggatatcgaccccgagactggcgatattgacgggctgttctaggttacgatatagatagaggacatatttggagcttgcatataccactgttcgaatttcgattcttcaacacatacaattggcgtctgatagttagggcccttagatggatttttcaacaccgcgcaatccggggcaattggacacgcgaaattcatcccgacatattatttcataatcaataacatttttttctctctgaatatagatcgtacaattcggttggagctcttccggggtcaaaaagagggccggtcaatggccggagttgagctccgttctccgggaaccgctttaccaccgcgtatagacttcttcagcgggtcgattgatggagctttgaggtaaaaaaattggaaattttacctgagaaaggattagatcgatgactcaggacacttggaagagaaagatataaagaaaaagaaaagtccacgtgaaattgtcctaaaacattcccaaaccaaaatatccttgatatctcgtgaccgtccggcttcggcgcttcttcttgcggaactgttcataaagtcgccaacctccattacaccggacaaggctttttcctcttccactccttcgaaccctccagtttccttgctattcggtaattatcccttggcttactgccttcctggtcttattccgatcaattcccgtattgccccggtgccttaaccccccacgtacacccccatccccgaagtcgcatcttctgtcaaccgggaaatttcccgactccacatcttcctttctgccgaacctcattccctcggtagtaaaccagcgagtgaggcgactcgcattccacccagccaaacagaaactgtgaaactagcgctgacgtctttagccactatcccacgatgaacgctctccggtctagttccgcactcgctcgtcggtccctcgcgacccctcctgcccctctctctcccacttcccgtcttatttcttcctcttctttcacttccttactttctaagagatctatctcctctacctctctttcccaacaaactaatcgagttgttgcttgttcccgctggtccggatcgatcccctcgtctttcactcaaacccgcactatggcttccgaaaccaagattaaggtcaagacccctgtggtcgagttggatggtgatgaggtatgggacaacccccccttttatagttcaagctttcgatcagctggcttcacaaacccgcgtattctcgtgcttggctgccgcattttcgtcgaaaacgcggggaatcacggggaattttacgataattcatgtgtcaggccgacgattatgccgcccaaggcattgaagctagacattggcatgtgctaactggacgatcttccttaacatagatgacccgtattatctggcaagacatccgtaacaaggtaagcctatcgtcccatcctcgctcgggtcagacctagatgatcgcccaccccggttagttctcgatactaatgatctgcctatagttgatcctgcctttcctcgatatcgacctcaagtactacgatttgggtatcgagtaccgtgatcagaccaatgatcaggtcaccattgactccgccgaggctattaagaagtacggtgtcggtgtcaagtgcgccaccatcacccccgatgaggcccgtgttgaggagttcaagctgaagaagagtaagctcatcaatggaagtttgtatcgtgtaacactaaagctaaccatctctagtgtggctctcccccaacggcactatccgtaacattctgtgagtaagctcaatctaactggctttgaccatcactaataagctatctagtggcggtaccgtgttccgtgagcccattatcattccccgcgttccccgcctggtccctggctggaccaagcctattattattggccgtcacgccttcggtgaccagtaccgtgcccaggaccgtgtcatccccggtcctggtaagctccagttggtctacacccctaccggtggagagcccgagtacctccaggtctacgatttcgagggtggtggtgtcgctcagtgccagtacaacaccgatgattccatcgctggcttcgcccactcctctttcaagatggctctcagcaagggtcttcccctctacatgagcaccaagaacactatcctcaagaagtacgatggtcgcttcaaggacatcttccaggagatctacgaaaaggagtacaagaaggacttcgaggccaagaagatctggtacgagcaccgtctcattgacgacatggtcgcccagatgatcaagtccgagggtggcttcgtcatggctcttaagagtaagtttttccgtctatcttgtgttagtttatcttatctaacgtatgttcagactacgacggtgatgtccagtccgatatcgtcgcccaaggattcggctctctcggtctgatgacctccactctgagcacccccgatggtaaggccttcgagtccgaggccgcccacggaaccgtgacccgtcactaccgtgagcaccagaagggtaacgagacctccaccaaccccattgcctccatcttcgcctggacccgtggtcttgtccagcgtggtgagctcgacaacacccctgatgttgttgccttcgccgaggagctcgagcgcgcctgtattgatgtcgtcaacgacgaggctatcatgactaaggatttggctctcgcctgtggccgcaaggaccgcgaggcttgggtcaccaccagcgagtacatggctgccgttgagcggaggctgaaggccaacctcaaggctcgcctgtagattcccatttgctgcaaaatttgatgagatactccagtcttagattccctagaaggacaggcattcgtctagcttttagccacttttgtatagtatgcaattgaattgtcattctatatattatttttcaaagtatatcgtggacaaacaggttctcaacggtagtatctaggttcctgcgcttgtttcaggtgatacagttttccattagcccggctcaaccactccctgtctacctcgctaccacaggggtaaaaagttctcctgtaccgattatgggacgtaacatataatcctcaaaacgtcactcacgccacaatctgcttggggacaaaatggaagattaacaggaatcggagtatccaaatcaggaaataatggcttcattctcctagccgaacatcaacttcaaaccctaagcaggacagcaaccatacagaacatgtcccaagtatgaagcaaacaaggatcttccacctgataatgtgatatctatcccaaagccgtggtaactttctctaaagttacgggaggtcgttaccgaacaatcaccaaaaacctagaaccaattagggtatgattcggagatgtgggatccataactctattcggacagccaatcatatcctctgattttagttagccatcgacctagatcgaggtcttgacgcaagtggttatcgtcgcttcccaatgcggccaattcctcttttcgacggtcaaaccaactctcatacagggaacttgattggaagactaggggctcgggtgaaaactcctgccaatctggctgtcaaactcgtttgttcgtcacagggtagccggcgccagatagatctgggttaagacaggcgttttctttcttcctttcttctaaccttctacttgggattggaattgcacttctttacttgaaataagactacctaccaataatcacccgctgtgtgatggcggtgctgttctactacattccgttgaatacgatgccacacgtctacggcggtctccattaggattttgctggtatcttcgagacttgtcaattggtccttgccggtcgaatgtacgttgtggccatctcgtcggtctttacggggctggcggttctggttgttgccctgcggttatacactcggatccacctggtgaaggctcctggactggacgatttgattatatttgttgcattggtatgtattctcatatgatatgtacaccacgagtgcacgcgtccgggagacggagtgtatggaaagtgagaacccaatactaatcatccaatacagctcgtcgacgtggcattctatacctttacgatgcttggtaagtggtctactccaacaacacctcgactgaaatatacctgaatctaacaaattcctccatagaacgattatacggcatcgggatccgcgcatcagaactctctgaatatgacatcgagcgccaactatttgtacggcaaaagtcccttccgccatcgaatggaacaagccactaatgaaaaccaatcacagtggttgtggctttcggtccctttttacaacatgactatgatcctagccaaattctccgcactcacactctacgcccgcctcttcaggccccgtcgcttcctgctaatcacctacagcttaatgggcttcctcgttatcgtaggtctgtggacgagcctgagcggctttctcttctgcattcctctccacgccttctggagtccatcggcagaggttcgcgactcaaactgtctacctgccagccctgtctggttcaccaatgcggcactccagacttttaccgatctggtaatattggttctgcccctgtcgctattatggaagttacagctaccgagaagacagaagtgggggatcctggtggttttcggtcttggaatcttgtaagtcgaagtaacatagtttgtggttgatctcgggaaatgaagctgactctgcttacagtattgttggcgttagtgccgctcgcatgtatccattaagcatcatggttggcggaggagattttacgcgtaagtatataccatctctccacgtcttgcgatgcacggaatcaacaacaagactaacacaccgatagaggcaaatgccaaagcagccctttggtcctgcctcgaagcaaacgtatccatcatctgcatctgcctaccaccactccacccgctcttctctcgcatcttctcattcttcttcctccctcgaccgatccgctcaagagcctcgaggtgtcattccagcagatccccgctcaaccgggatgccgggatctggtgcaacgaactcttcagtcccggaacagcaagttactctgctagcatctccaaggtcgatacgaacgaagaggagcaagaaaaagcagaggggattcgtgttaaacgcgagctgaggatgcagtcgaatactgttccttctttttcccgtcctcagtctgcgaatggtacctatccggatatcgagatgacagaggggtcgggcagtctgaaatcgtctgagcatccatgctcgaatgctagttttgagagggatttcggtgatttcgagttccccgactataagaatcgaatgaatgctcctatttgaaattgtcgggagcttggtttgtatatatggaacataccaatgtctgggatgtgattgcatatactgatgatatgaataacgatgttgattttatgagttttattgagtcatgttcgatgcgggtggaatatttagaaatttagaaagcttgatatatagtaccctgttataccccgttcgagactggggaaacttctgtagaaacctcaagagtaccaaatataactagtccgaataagaaataagcaccaacccttccgtctcaagcctagaacgactcaaagattcgcccgcgaggtcatcttcctctgcatagcctgttcaatcgccttggccgcagcaatacacttctcttcaccgaaccggccaccaacaacctgtatcccgacaggcataccctccaccaggttgatatcatctaaaaaggaattagcaccgtcctcaaaggctccaatcttatatactcacattgctgcttattaaacctatcactatcatttctcggaacatgggccagccactcatcatccggaacatccttcattctcgaagcagtagtgataggcattgccaacgcagcatagccaaggaaattccagatactcgtgtagcccacatatgcactggacttgacccacgtccacggtttgtatcccacccatgaggtattgggcatgatcaatacgtcgatatcggaggttatccatctatcgagatatgcagattcgaaattatatttgtccgcattgagctatgagatatgttagcagttaataatcacagtgccgataggagtttctcacttggtgcgtttgactggtagtcagagtatcctcgggcttaccaacaagcataccctcaacaagaggctcgccggttttctctatttgtctccgacagccctcgccaccgtcggagaaaatagccttcgcccagaggtcatatgcataactgtgcgaggaggcatcccactcgaaaactgggatttgtcagtacgtcgtacagaccacgcattgggagtggaggttgtcagttacgatacataccctcatggcccgccgcttccagcgcctcaacaacctcccgcatagccctcgcaatcggcggctgaaccttgacaacaccatcatcaaccaagaacccaatccttaacctcttcgcaccaggcgaagccaactccttccgccacgccacaggcgcaacatgctgatcaacctcccacggcctcgactccggcaaaacctccatataccgctcaatagtcaccagactacaagccataggcccagcaaccgatctcacaatatcctgcccgggactagaaatcatcaaaatcagcaccccctctaacaaacgcaaaacagagaaaaataaacttacttcccccgttcatacggatgtctaccgggactaggcgacaatccataaagtccacacagagcagccgggatacgaatcgaaccacccaagtccgtgccaataccgagcacacttccacgcgcagcaaccagcgagccctcgccgccggaactcccaccggaaatcagactgcggttgaaggggttgacgcattggccgaagacgtggttgtacgagtcggacatcatcattgactgcggcagattggttttcacgtagaggacggcgccgaggcggcggagtgtgcgcgctacggatttatctgctttggcggggttgttggtgaggccgacccagcctggattttgggtttttgttagtatataaggataggtggctttttgctatatggaagtggaaagggagattaggttaccgattgaagtgtcaactccttcaacggagaataggtctttgatggatactggtaatccgtgtagagggccgatagtcttgcccgtctgggcgagataatcatctagtttctgggcaacggcaaaggcctcctcgaagaatatctccgtgcagcatgttgtgagttggtgggcgagagcggcgcgcttggcgaagactcgagtcagctctagggacgagagttctccagaagagagcttgcggagaaggacggcgatatccgtctcttccgtgagagccagttcctctggactgagaatttggcgcagatatgccagagcgtctggggcggattctatagagggaacgggatctaagcgccattcggggatgatgagcgagagctggtcggcgcgcttttgagcgcaacggtcttggtacgaggtagaggtagccatgggaaataactatattgtatgtttatgattgaactatggaggtaggaaactggattctaagaggacctttatatgctcaccaacaaagtagataaggaatgtgataccttacccgattaggaaggcaatctaaccgagactaaaccccacaccgcatatcctccacctcctctcgcactgcgcctctgcgtccggataacgagggaattcacatgactggcagttacgccagtagcctcgtattatctcgcactgccgtgttatcgaggcactcatccctatcaggtatgcgggggtagctaggtgcacgtagaacctcgatgtagaagggatctccgcgatagcctggcaagctcgatccaccatggaagacactacatttgactgatatgtcgatgcagatgaatcgccgcccgtggccattcctgcgcgaccgaatgccatgattgcggcggcgcctctatacacggtcgcagcaagattgcggtccgtcaagtcgcccgagttgagctgtagagtttgggctattgctcgagcacagaggtccatagcgcaggttccattgccattgcggtgttttgcaagataaacaaataaatcgaacgtatctgctggacatccgactgagtcgaaaaatccaatagttaaggtctcgcgatgccaatcctcgaaaattaatggactttccctgacaagggcgcctgtaacatcaaaccacaccagataggctaggatatctgctagagcggagatctcgccgcagagattatcgagatcagccttatgttggcagtggagatctagcagcgagcgcgccccttggagatggcaatgccagttgccaaaagatccgcagcacacttcaaacatggcgaaagtggcgatgccgaaaagcgcaattgggtgtgcggactggacaacttggttcaggtttgtcaaggccactagatgcgactggagggattctttgttgtttgcatcttggatacgcgagcgggcgaagtttagcgtgcgtgaaatcagttggattccttcttctggaatgtcacgactgctggattgtatttgttggcagaaagtgtccaggaggtcgacgaagccgtatagattgatagatgctgacttgtaaacttcgacatttggcgattggtcattgggagtctgtggtgaggtgcttttgggcgatttcggcttcttcttatcatctacccatacaactcgctgtggatagttgcatgcttctccaccctggacacaggcttgacatcggggccggttcaagtcacatttgagccctcgggctttgcatcgaccacagtctcgatcgtgccgaatgcctcggggctttttcactttcatggtgtgtgtgaagttgccaggcttggaaggctatcaagatgcatagtgcgggggttgcggacacttccccgattagtcttgggtggagctctcgtatcttcgatgttgatccttttagtgttttggtttcggctgtttctatatcttcttcagtgccggaggaaaaacaagaagagagtgtgcattttatctagcaataaccctgcaataattgggttcaactctggttgaggtcaacaagtgaaggacacacgctgcgaagaaaagtgaaagacaatatcatcaaccgggagccggttggaaatgatcagagacaagataaaacgagggcaaagtcacagccggtcgagaatagtaaaattaaaacaaagcctgcagcaagaatagagaaaagagcgtgaaagaaaacgagagacaaatttgctagccatgtgctaactgagagcaaaaaaaagcaatctcgccagcaagaacagaatagcccaaatgaatagccagacccagaaaaaagcaacagaaaagaaggacatctatctataaaccagaaaccagtcaaataacttttgtgaataataacatcagtcaagacagtgatacagcctcatgtgttgttcagaccatctctttctgcataactcagtgcttgcacatacccgggctccaattgggaatccgcatcatgtttcgatatggctgcttgccacgatcggattgcttcctgcgttgcatcatgcgctcacgtcgatcgcgtctcttggtagccgaattcggttgctctggcttcaggttcagcgcttccattgaaatcgataacggtgattcttggaactttctttcttccgcgcgtcgacgacgcagtataacctttcgatgatgtcttgagataacacggatggaggagatcttggagaccttggagttcgccttggaaacctttgacacctttgagtctgagacttgagagagactctttgcttctgcaacactgatactggcatacaaactgcttccacgggagagctttcttcttcgcattctcttcatttgctcgatggcagcaactgtgagagatcgagtggacgcaacgcttccactttgcattgatgcaacgctttcgttttgtagggatgcaacgcgctggggcttggcaaacggtccatcatgtgcatgtggataaggggactcaggcctgcgagtgttcaccgagttggtcgtggacagaggagggctgccaacgccgactgttccaaagatgtgaggaggaagcgagttctcgatgctcatacgtcgttgcattccagcagggcctgatgcaatatccggataatgtgagttcatgtcaagcacacacattccaacaaaaggcgcctgaaggatcgcactgaaaggaggctgctccaagaagtggcttgggggggcatgatggagcaccgtaggcaaggaaacagcctcagtgtgctgggtacttggtgagccgggttgttcctgacagtctttggtcgggcagggcttattggcagccacaggagaatcatttcgtgagacgctctggtgcagtgagtccacaccgtgcgagcagtgatgacagacaacgtcatattccccttctcgtggtataaatgtcatggacgccgggtacattcccatatacatgtcaggggcccagttgcaaacctccaaccaagaaggtaactcgtcgagtgcgataagaggcgtccaaaagcctcccggacgcaggatgcaaaatcgtggacgtgggcgtagaagaaagcttggagggtgctgctgagattggacaaagtccggacgcggggtagtatactgcattttaaagagactggaagaagaaggaaatgagtgtagtggaacaatgattgtataataaaagagtgttgtatgaaagaatgtatggattatggaagaggaagaagaagaggagaaggaagaagaagaggaagaggaagaggaagaggggagcgatggagttctgtcgattctgaggaaggaacagcatagacagtattgcaggaaggagcgatgggtcaaatgtcaaaaggaaagaacgatagtgatgaccattcccagtaagtataaatctgatttctagcagatgttcctcttactgaggagcgattggctagagtattatattccatcttgtcacgtctgctggacaatatataccggacacgagagaggtcatcaaggtcaatgacgccatatgtatatacgatgatatagcgtcaaattttcatttccttccaagttctgccttggcatcaccatattgtcaccttttcgattctccttgtagtcaagttgagtcaaaaccccccgggctgattgatactagggctattttctccttatcttctcttatcgcgtgttatcggcacttcaaagcttatcggcccggatgcaaacaacgtccgagctactctggcagccaagtgttgtacacaactcatactcactcttaccaacttaccttcctctctcctcaactcccttccttccttctcaattacaatcttttatcaacaaaaccgactccatcatgacaaccctcacagacccaacgaacgccacccgcgcaaccccaagcattcccatcgagaaagcagtcctccacatcggcagctcaaccttcataagcgcccccaaccaagaagtctgggcagcgctaacaaacacctcaacctggccaagctggaatagctttgtgccacgggtaaccattcgctcccagccaaccccagatccatctccatccacctccgcaccggacccagcaccagcgtcaacatcaacacaaaccccagcaccaacctcccaaaccgtaaatacaaacacagaactatctcctattctccaaaaaggaacaaaattcaccctacacgtccgcatggacccaacctcaacctccaccaagccccagccggcaacagacgtgcatgccctcatcagcgaatgcagagcgccaaacgcggagaccggcgaggtcggccgtatcgtttgggtcgctgattccgaagcgccgggctcgttttcgccatcgcttttgacggcggagcgtgtgcatgagattacggctgttgagggtgggacagaagtgaggaactgggaggcgcaggttgggtggttggtttatgcggtgcggtggctgtataaggttaagctgcaggcgaattttgagatgtgggttgctgatttgagggggtttgttgaggggggcagtattgctagttcttcttgattacgcgttgaaactgttgccctgcgagctaggctcgaaaaatctgggtatccccgtaacatgatcaatagttagccacctggacactttattacgcatgattcaacgaaaagtggcatgatacgagtgcttgaacatcccattgatcctgctccttgacaccggaatcggatgagaatggcctgagcgttgagccaaatggcatttgcgctggattcagatggtcagtagaccgcaaacgcggccgacgtgtcatgctatttaattaaatattatgttcattcctccaatatgcaagtatgcaaatatgcaaatatgcgaacaaaatgtactccaatgccatacatgttccgccaaactccatctaaacagggtatatggacaatgcaaataaaaaccaaaacaaataaccaaaagagcatagcaaatatatcccgtctaacatcaagcagacgcaagctcgacccaatcaggcgtcgtaatgcgcatcgccggatccttaacaacagccggcttaacaatgcgctcaacgaacccattcctcggtacccgactgccattcatacccgacctcgcaaaatccacaatctgatgcccagccctcgccatctcgagcctgagccgatggttcatattaggataaagcagcaaatcgcccgtcgcagtcgcaagcagcgtagccgccagcgagaagacatccgacgcaggcgtcggcgccatctcagtagacgtgagggaagccagcatttccggcgccgtgaacggcggcgtgaacgagggcatggatgcgcgcgtggtatcgagcggcgcatcggccgtcggaatatcaacggtggcggagaaatctgcgaacagaggctcgtaagggaactcggggttctcgctgcactcgtctgtgtcgatgggtcggaggaggatgttgtgtggtttgatgtcgccgtgcacgacgccggcgacttggtgcagccagttcaggccggcgataagcttgcgcgcgagctcctggtacgaggctgggccttggacggggtcgaacattgttgctgttgcgggtctgcgggtgcgcgcgagctgggattgctcttcgatgtatagtgccagggaggaggggacggcggtcattactagtgcgctaagctcggcgctgtagccgtggaaggggacgatgtagtgctcgtggccttgggtgaaggtgaggcgggttagggttgatgcttcggctttgagaactgggcgcgcatcgcggcgcagtggtgctttcacggctagcacttgcgatcttgaggttggggagcttgggggtgtgccggggagattggtttgcgggcgtggcaatgagcgcgctttgtatactatgctccagacgccgcggccgaactcggcggggcggttgttctcgtcctggcagatttcgaggtcgtcggtgaattgtagagtgccggcattgtccttggaaatggacgtttgctttgccaaattttggaatggacttggagttgatcttggaggcctttctttggctataggcgtcaccggtggggtgagactcgatggggcttgagccgacagtggcgggctttggccggctgtctgaagcgacaattgaattggggaattggccatattttcagtgcgcaataccggaggaattcgcgagcagatcagggtctatatgatcccgggggaacgggcgagacccgcgtaatcgttctgatatcaacagcgccaccgggacatgcgataggcaaattaagcctcacccacgggtgcaagtataataatgacggagtggcgaatggtgtttataagattgggctagaagatagacaaagaataacagggaaatggctatgctaaaagtactccgaccaacagcaaagaaaaaaaaaaaacaacccaaaccggcccacttccggtctcgaacatgcaaagggaaaaagagagaaaagggaaagatacaagatcgacggtgacctcaagatactacggtgtcactggataagtgcaaacggggggaactaatctggagacgggtccagttcatttcctttgactttttaagattagacaagtcagtattcaacggttcgacttatttcggcaacctgcgatttgccgcttcgagttgcgatcggcttccgttggactcacccgaatctgaccagtcaagggcaaccgttgaacacatgttcgatcctgtggatcacgtaatcacggcagggtcccgaggtcaggtgattgaccagcgatcacgtgggaagaattagtcatcctgccctaagccgcccatggctaccaaggccacgggctggttgcaccggagacgagaaggttcaacccggttatggcgagggtcactgatcgcttgtagacaaacggctggtagaatgaggcaatcaagtccatcctcaagcgcgtcaagctcgtccttggttagtaatatatgatacccaatcccagatacccatgatgccaacaatgttgaggcaaagtcgaactcatggctcccatcaagggcttgtctgtttttggaatcctcttaaccagcgagcagatacagtagtgctccaagggcttgggtatgagtcacactcgggaagcggcctgtgacagcaaagcgccagcacgagattggcgtcaccataaattcccgaaatggcgttcaggcgcagtgacgaagaacttggaacacgaagttggcccccatgcgacattctcatttgtagcatggttgcaattccgacatcacaccgcgccaggtcattgccttgcgggaattttgccctgggcagccgtcgacaccagaaggtgggatatcgggcgctctgccgcttcatattataacttcgctctccattctgtaatctcccgtcaagccagtgcttattgtagcaactgacatcatatcatcatcgaggggtgagcctagggtttatctttcaccatatgactgtctgggcgatgacccgaatatgatgtgaagaggaagtccaggattctggttgttccgatcggattgtgggcgaagtctgtcatagcgtgcgtctacaccataataatactagaattcgaacaatatcatgggggtatcaactaaaagaacataatggaatttttaaccggaatcttcgtaggggtttacagtctccgcaaaagtccgattgctcagccagcctattttctactcggtagatagtagatactacttgaaatccaagaaaaagaaatatgcaaaaatggaaccagcctattgaagctttcgattcagctctctgaacccctgttcctagggcttcttatttctccaatcaaatcgatcttcaagctacggagtacttatccgtatcacccgggtgaaatctgggtgaaatctgggtgagacgggccggcgcgatcaccacacgtggctcagccagagtttagtgctatatcattgggtatgagtgcagggtctggaacgtttgatatgcaatgtgctccgtatacatatcagattttccctgactggggggggctgctgccgcacattctattggaatgacccctacagtagactttggtctcgactttgagggtggcttggaatgcgcgagatttgggcaaagtgtcgtttgaccaataatattcaatcggcaccctgcatctctatgttcaaaatggtaaatagtgtgtcaatcaatttatttcacatcgagacaaccaattgaaacatcaagtggttgttggtggctgttggtggctgttggtgcccgagccgaaagggctcctggggtcggggattacaggcgatcagtgttccccgcttacccactgtttcccgtttacctataaataaccttatacatagttagcacagaggcttggcatatgttagttaccgtatttagtgcttatgttgtatgcatgcggtcatccttggcctggccgaaataccgaattgagttgagcggtgagcaccaatgagataggtaggttctcatctacccttgaaaagattatagccaattctggaggctctttgaactcatagcctccattttcaatgctgttcttagtatgtagtgtagtcatagattcattaatgatcttttgcgcagtggagtacattaaacattattgcctagcaacccatcaatcaaataagacctaaacggtgcaagaaaggaaagaaaatagcaagcagaacggtcagaacataggtaacagagggaaaaagcaatatagaccggcaagaaatggccaggaataggaatatcaccccattctacccatgaacctgcctctccccacaagacatcaccccggaaacataatttcctctttgctcagcatattacctatcttcttcttccccaacccttcctcaaaggtcttcccatagtatgccaggcttggaccacatacccagccgctccctctggcgtccgctgcacaaagagcacccccatcgagatatagaatacaccgacaataccagtaagagctccctgataccccagcattcttttgccacgcgatagatacaaggaatcaccaagatctctttgctccccggatgaagaggcgtcaagcaacgcattcataccctgtagagtaccgaggacggtcactagagcgagggcaagcgagaaggcactgaaagtgattgcgatcactaacattgccttgtacgacttctttctggatgtgcctgtgcgagcaacgaggagcataattcccgagatgaaaaataggagggcatgaacgagaggaggttcacagaagaagacatcatcttggaggtgtttgaattgtgggagggtggtgttcagaaaggtttgaacgtcggattggacactagagacttcgtggtctaggtgctcccaaagttcttcgctcaggtcgtccagatcctttcggcgcatgttcgagacgcagttggtgaacgtttgtgcggaggaattgccatcggaagaggatacggcagctgcatcggtgactgatagacatcctcctacatacagttagatgggacggatcttgattaatgaaggatgatttggcctcttgtccactcaccaaagtagcccacccgaagtgagatatcgtaggtcgtgtttgttgagagctcagcgaggtagattttattggaatctgccattgtccaggcgcagctcgttagaacataaactggatgccgttagaaaatacactgtatcacgcattttgtctaaacttacgacccagactgattgccagtagataggaggcaaccgctagaaacacgagtgcacatatggatttttttcctcttcggttaccccctactataacgcatggaccgttagtattattctcaagatgttgcagtcgccaaaggaaaagtcaaatttcttacttggtttctcaataaccaccgtctgtggaagaggcgcataattcggtgcatactgagtgttcgtgggataaggattataaggagcggcaaggtgaactgcactggtagacgaagttggctttttcttgccagtggacttctttcctgtcttctttaccccagtcttcttcaccccagtcttggccttctttcgtggaagtgttgaggagctatagttctccatggtgtacggtaggtaatgtaatggaataacttcagagcctgcctttggatacgtctttcaggctcacatataccttttatataccccagttaaaccagggaattcggcctattggctggatagtaagacgtatgactggtgggaagtaggttctccccgaaagtctatccctcgtatacggacttggcagaaacgtgtatcaaatgggggccaagcgccatagccctaacaaaataatatcaagcagtagcctagcctcctagctcgtgtcttcgaaaaaggaaatatcgaaagccaagactctcaagcgggcaaaaagaggggtgggctgtgttcagcctcaacacatgcaatttagacctgtaagttgtaggcccgactgggcttcctacatgtctacttttggttgagttagccttggcaaacggaggctactagtatatttcggacgaagtagttcaatatacagttttggtctattgacgtgatttgctcctacgtatcggtacatcgtgtattatgaacatggggtaaatctagctaaacgcactcatcaggaatcgatagcacgtgaaagtcgactcgacatctcctcggaaggttcaggatcaccagacaacctgtgaacttgtggctgatgcatatgcagcaacgcccagctaatttaagacctacaggggtggtggtaagatttttcttcccacgtacgatactatcttaggaagtgcctttatggatactattttggagatatggcaagattaaatcacactaaacatagcccgagaaacgggacaacagttggtcgctttatactccttagaacggtggaggcttagcccgctggtgtgacagccactagctcagcctcggatcattcacctgggcatacggctcaagagaaactagtccacacctccgtaccgctctcccgggacttttccatctgtaggtcataaggccgcgaaatccattgtcctacatatttctccatgcccttggataagagacttggatacgcaacccttccctcccaaacgttttgttgaattttacgtcaaacatggctacatatatggcacccattcctcctagcggacaaggcctaacggcaaggcttgtgcgccaaacaaagattccaaagcccgataagcacgacgagagcaaggccattgacattgtagccgtccacggcctggccccttgggagtcttatcctgacgcttccttctggctgcgcgatttcattgcaaaggacattcgtggggccagagtatttacatttgactacgatgccaaggcagtctggttatgcgaattgcctctgaagaatatccaggatgtgtccagggccttgcttggccaaattgttgctattcgggaggatgtccccgagacacggcctctagcattgatctgccatggcttcggtggctttattgttgaatcggtgggtctttgtttcagcattcctttactggggtattatatagctaacaaattcctggaataaagtgcctgaatgatgccttttcacaattcccaaatacaatcgattgcactcggggaatcatcttccttagtaccccacaacgtgcatcaccagggatcacgtgggcgacgctcttgctgcgttgcgcgagagacagtatacgtacacctccagggctgacacaggctgaactggcatattcgcaagaccttgtgtgggcaaagagaagtggagttgttttatgcgatatctccgagggcttcaaggcaaaggttaccaagaggatgaaattgtttttctgctacgaagatgttccgacatggccacagcaagaatgtgtaagttctaactcacaagctcttgggtaaaaagggtggtatgctgatattgcctatagagtttgaacgagtattgcgcagctcttggtcgtcgtggcgagaaggtcgagttgatggcgggttgtagtcacctctccgtggcaaatttccaaagtagggaggatgagaactacaagacaattatctctgccatcaagaagatccgaaagttggcattgaaagacacagcacccacttcatctggactacacgaaacggctcaagaaattcagaacctccaggtcatccagtcatcccaggccacgagtatacataccgtccagaacacttcggtcttgaaccaacagaatttcagcatgcagaatgcagtcacggctacccacaatacatttggtgctcgtgaattaagccatggttcatcgcaaggtaccatgatagcgctcaagaagtcaggaccggcctatggcaacatccaggatgcgtcaagaatatattccgccactccacaatcctcgcaatttgacgcgaatatgatgaagattcgcaggcgtcctgttggactgtcccctgtcaatcaaatatcaaattcacctggtcacgaatctcagcctaacataccatcacaaaatcttcaatttacgtcgggacaattgggacagcaaacacagcactacgccaacattgcaccaatcactgcgctagaaccgaaatcctccaccaaatcaggcaagaagcccaaaatgccacaagaagccggccctccacgtcccgcaaaactaccattgaaccccggagatgcggcacccagaccagcagtcgtccgccaacttatcggtaacgaggggatgctctccacttcaagcaacattcacagaacagaccagcaaatgcattatacaaccataaatagcatggcaatgagttcatcccaacacatctctccgcagcctagttcagggacatacaactaccctccagtcccgcatccattccccaccaatcatcctatgactcttacagctggagcaatgcctgttcaactgacatccccacagaaagtgacaaagccgccgaaggcatcctcaggcgagcaacgccccgaacctgcaaagctaccagggacaaacccgatgccacaccagatccgccccaataaggttgattcgggagttagaggacctccgatcccgactaccacagctggaaccatacccaaagtcgctccaatgcaggcaccccccaccgtacagcaaggcctgcgggaactgcagctacagcctagctatactccaccccccaagaagcccgggtttttcaaaaggattttttcgtctagcaaggaatcggcacctgtccctaccacaggaggtcctggagtgcgcccgggaatacaagtcggtccacaccagccgtccgggcagaccagctggggaggctctgggttacactcggggccacaagtttcacaccagccattgaacccgtccaagtcatccaaacctccatctggacctaccagtttgggtggccctggagtatactcggggccacaagtcggttcacaccagccactgaagccatccaagccttcatccaagtctccacccgggcctaccagtttgggggaccctggagtacactcgggaccacaggtcggtcttcagcaaccgttgaagccgttgaagccgtcgaagccgttgaagccgtcgaagccggccaagccttcgtccaagtctccatctgggacgaccagctctagtggccctggagtacactcaggatcactaggcggtccacatcagccgttaaagccgtcaaagccgtccaagccatctaagccatctaagccatctaaaccatctaagccttcatccaaacctccgtccgggcctcccaaactggtcggcccgggagtgtactcggtatcacaaggcggtctacaccagccattgaagccgttaaagcagttgaaaccgctgaagccatctaagccatcttccaaacctccgtccggaccgaccagtttgggaggcccgggagtatactctggatcacaaggcggtccacaccagccattcaagccgtctaagccgtctaagccgtccattttgggaggttctgaagtacactcaggatcacgaggtctttcgcaacagccgtacaagccatataagccgtccatgccgaccagcttaaggggacctggagtacactcgggatcacgagatggtccatatcagccgtacaatcctctatcacatacgcacttgtcaccctatggcccgccgagaccgggacaaggcccattgatacatggtcacaataataatgaccacttcgggccagggcaacatcagacttggggtcacggtgatggttttaattttgcaccaggtcaaacttctagtcacattactagtaatattccagtcgaacctccagctaagcccacgggttcggttgaacctacaggtccaatcaaacctccaggcccagtcgagcctccagttgagcccacaggcccagttgagcccacaggcccagttgagcccaccggcccagttgagcccaccggcccagttgatcccaccggcccagttgagcccaccggtccagttgagcccaccggtccagttgagcccacaagtccagttgagcctacagatccaatcaaacctccaggcccagtcgagcatccagtcgagcatccagtcgagcatccaatcgagcctccagttaagcccactggtccaatcaagcctccgggtccagtcgagcctccagtcgagcatacgggcccagtcgagcctataagtccaatcaagccaataggtccagtccaacatacaggtccggctgagcctataggacgcggtttcactcctgatgagagtcatggccaggcctggaagcccgatcacagtcgcaatcaggctcaccagtcccagtcccagaatcaaagcagtcgaagtggaaatatagccgctggccttgcaggtttagctataggtgcgggtggtgcagcttttatggtggcttccatgggccaaggcaaagaaaatgacgaaagcaatgttaacgatgacaacaaccacgaaggcgatgatgacagtgatagtcagggagaagggggaggtgatagtgatagtgacagtgacagtgacggtgacagtgatgaagatgatagtgatggtcaggaagcagtgggaggttatggtgacagtgaggaagagggtagtgatgggcaggaagaagagggaggtggtgacagcgatgaagaggatagtgaagagggaggtggtgacagtgatgaagaggatagtgatgagggaggtgattaaggaggtggtgacagcgatgaagatggaggtggtgacagtgatgaagaggatagtgatgggcaggaagaagaaggaggtggtgacagcgatgaagatggaggtggtgacagtgatgaagaggatagtgatgggcaggaagaagaaggaggtggtgacagcgatgaagatggaggtggtgacagtgatgaagaggatagtgatgggcaggaagaagaaggaggtggtgacagcgatgaagatggaggtggtgacagtgatgaagaggatagtgatgggcaggaagaagaaggaggtggtgacagcgatgaagatggaggtggtgacagtgatgaagaggatagtgatgggcaggaagaagaaggaggtggtgacagcgatgaagatggaggtggtgacagtgatgaagaggatagtgatgggcaggaagaagaaggaggtggtgacagcgatgaagatggaggtggtgacagtgatgaagaggatagtgatgggcaggaagaagaaggaggtggtgacagcgatgaagatggaggtggtgacagcgatgaagatggagatggtgacagtgaggaagagggtagtgatgggcaggaagaagagggaggtggtgacagcgatgaagaggatagtgaagagggaggtggtgacagtgatggagaggatagtgaagagggaggtgattacagtgatgaagaggcagatggtggatggtggtagtgatggagatggaacgtagccctagttttatatgtccttgcatctatctgtatgtcgatgttcatatctgtactccgtattgacaatcttcacttaatgcgctcatacaaccctaaaacccccagacaattatgtattcccatccttgtttacattctataaaattctataaatccttttgtccaaaataatatacagttatatacatagtgccaatcaggccctatttgatcttcaagccagtagggttattagccccattgcatagctgcgcctgggtcaatgtcccacccagagctcggctgaaggagaaagcagggagcttatccggaagcttctcatacttgatcgcgatatccaacagggtttctgcggaaagaatgcggagtcgaacaccgctcaaatcatagtccacgttctcctggtagctgaaagctgggtctgaagttgaaccatctggcaagggcatcggcccatagccaggcttgagtcttctttcggcaaagttcgcaaggcttggaatatcccgcacatgactattgatagtctcattcgggaaaagtgttgtaaggagttcggcaaccggcatcttgttggacacaaatgctaacagtccataataccggtcgaggactggttgtaccattgcgctcggtaggtcaaaggccttcttcagaacgggcgggttagggtccgcttcgaaatatatgactccgcgcccgctcccacgaggataaatctcctctgggtcgatgtataggggttcaaatggtcgtcggtcatgtaccaggccgccatttttgggggcttcaaccgagcggaagcgaagatcatcgattgtgaaattatgtttttcccatattgtccagtgagaagttgagatcaaagtagtataacttgatttgagagatattatctgatcttccagagccttcagactctcaacactctccttaggatccgcagccgcacgtgcaaatgaccggcccagttcgtcaagcttaatgattatgttgacaagcttttcgcgaaactgatgggctgaattttccctagtgaggtgcgtgaatgctattcctcgccgtcgaatgatggctttgatattggggtctgtggtctcgtggctcgaagagagacccaactcgtctgctgccgcgatgtccgccaagagcctctggtgaacatcactaagcactcgcggctggtttggtatttcttttttgccgcggtgaacaacttctggcaccagctttaacggaggaagctctctgtcaggtggagtgataatattattcgccgcagctctttcagccacgagcttcctgttgtcatttaagtaatcccagccttgccatcgaagggagttttcagtttcagctggagtggcaatctctatgttgtgcaagcctatggtctccgcaaatacaccagttcgtgtgcgctctgtagtggaccgaggtagcatattcgagactccattgaagggcaatgaggcaatgactcgtacggccccgtacaaattcaacccattctgttctaagcagcttttcatgaagctgagaaaccagcggttgggtttgaaatgatccgtcggagagacagcatcaggcagattagccatgatgagaagtgtatcgttccttggtataatcgcagagccttctcggtttccaggcccttgttctggaagatgagttgcaaagaattcagaccaatcggctttcccatatatgcgatcatcgacgagcttataacacggcttgctcttagcgaggcgtgtgagaaggccgtgaaaggcatgatttggttcaacaagaatatggcgacgtggtttaatgagttcattcagtctagatgagcagaaaccacccccgggccaaaggtccagaatgtctaccggcgggtttcgacgaaggtagggagatacgcgctcgaaaacatggtctgcaaagttcaaggcgtataagcatatttgtacccattgtgtataagagctgagattcaagacttgcctagtagccctggactcacgtattgcggttgatccttggttttcccacgttgaaggcggatcgccgagtaaagcgcctccgtgaccggaaaccgcgccagcggcattcgctctttcctgattcgcctcattataaagatctggcaaatgccaagatgattcttgcgtatggcattaatggaaggagagtactaattgaagggagaaatgtgagggaatccctcgaaatttctttgacgttgaagagcggagagcggagagaccaagcttcccgctctctcatcccacctcttctcccctcaccaggtttatcttccaggtcgcctagatgcggctcccacaattgccgctggtctttccaggtttcggagattcctatcatctcactatgctctttgaggcttgatcctggctcaaattcatcattttggctttctaattctcgtctacccttgccttagcgcaccttttttgttatggcttccaatgcgataggaggtactgcccctcaaagtgttgagcatattacgcggatagcacagaactacgagtacaactcttcagttcctctgcggtactggctgaggaccgccgcgacgcttttacgtgaggttggttatacctgttgcctgcacgtggatatcgattactgcagacttgttgacttttcttcatttgttaggctcacatttatgaacgcgaaggacacgatgagcaagcctatctcattctatttcgacacgctcagttgatcctggtccatctttccaagcaccccgatgtcaaaaagaatgaggaagatcgcaaggcattggtggcagccgagaaagaggttgagaaaaatcttagcaagttggagattctgcggccgcgtatcaataagcgctatgagcgttacactcagttgatgcgggagcgcgaatctcgccaacagccctcacgagccaaaaccatccccgaaccacgcgaacaagttccggatcctgctctcgccggcgtggcagagcctttggaagctggagagaatcgagatctcgccgtgcagttagcccaatcagagctcaatcgccgagccaccatccgaaactcaaagggtctttctgggccatctgccgaggagattgaaacacgtcgcgcagctggcatatggagggagtgggaccattctatgaaatcggactctcgcacgggtgatcgcgaccacacaaatcaaccttatagtcaaacccccgaagagtccgaggttccttcatcggctgcttctgcgtacaagtatccaactgtgccccgtcaaaagcccctggaacccactgtgtctccaggccaaattgccatactcgataagaatgccgaacgctttgcgcctccgatattgcctcccaaggaacaccttgagcctagccgggcatctattatcgatgattctacaacggctgtggtgccatcgcgaccggcaaaggtattgccaggcccggtgctgcctgagaagatccaaccttctaaacaaaccaccgccacgcgttcagatctcgatccctcaagttacaccttcaaaccctccgcctatctcgaaaatggcacccccttgcgctcggtattcttaccagcgaacctccgatcccgctttttatctatggctgcttttaacacccgcgccaaccttgagacatgcggtatcctgtgtggtactcttgtttccaacgcgctcttcatatctaaactggtaattcccgagcagacatcgacgtcagacacctgcgagacggttaatgaatccgccctcttcgactactgtgactccgaggatttgatgacgctcggctggatccacacacatccgtcacagacctgtttcatgagctcccgtgatctacacacacactgcggttaccaagtgatgctccccgagagcattgccatcgtgtgcgctccgagcaaaaaccccgattggggcgtattccggctgactgatcccccgggtctaaaaacggtcctgaactgcaaccagaccggtctgttccatccacatgccgaggagaatatctacaccggggcattgcgaccaggacatgtcttcgaagtcagtggattagaatttgagacggttgatctccgtccggatgccttaaagaattaatagcgttgcgcttgaattgttcaatacactgagataccatcatcgtcgcattgatctggcttttttcgtgtgacatttcatatcttctagaagggtcatgccatttcaatagcgttaaaacttgctatcatgagtttccaattgaaatatttcctttctgatccatattgaagacatcagcatagagttggtaggttctgctcagatatatagccaagttcaaccttatttgacgacatttatgttttcagtgacaattagtgtatcaaaatactatttagtaagacaattgcaacttatatgtgtatttgatctcattccataggctagagcccaatacttcattgttttctcgtaatcatgccacgccttacaaggatggccaggtgtgacatcttagatttccccacatgataagtcgataaccatctcaacttcccctccgcattcgtacctctaccatcagcttaacatccttcgtcaattgattttgaattgcacgaatgtcgtccccatcacaagaaaatatcccctccgacacccccacctcctccacctccactccaggatcaccgtcccaggcacccacagaaaaaccaccctaccaatccgctgcctcctacttgtcctacccagtcagccacgtcgtctcaggaatctatcgccgcatagcagacccagagccaactaaagaaatgccctccgtcatgccatggtcgcggtcctcctcatctgaagcgttcacaccgcaccgaacagcctcacccttccaacccccaccactcacacccctcaccctcgggatccccacaggggccgactcgctccagcagcaactcctgacacgcccactagcagaagaaatccgactgctagtgccgccccgtctgcagctcgccgaaacctggcgtctagcctacagcctgaaccgcgacggcgcctccctttccaccctctacgagaactgcgccgagttctcgcaccgcagcccgcgggcgggctacgtcctcgtaatccgcgactcctccccctacagctccgtcttcggcgcctacatgacggacgccccacacccagactcgcagttcttcggcacaggcgagtgcttcctctggcgggccagcgtgctcccgcccccggcaagcttccccctcgcctcaccaggcgaaggaccccagtctgaggaagccctcgagcgcgctggcctcccccctcccccctcggccgataccactaccgccggccgctggagcaccctgcgcaacgataagtcgaaacctgcgcgggcggaatcgccggctcataatctcaatatgaatattaaaactaatctcgccgctgcgagtggcggagtcctggcgcctccttcgccttcctcgatccatagcccttcaccgagtggtgcgagtacccccgaacgcattcgcttcaaggctttcccgtacagcggggttaatgattacatgattttctgcgagactggatttctcagtctaggaggcgggtaagtggttgacgttgctagaatatttatttttcttggctaatatgacgtagtgacggccactacggactgtggcttgacagcagtctcgaaaaaggtgtcagttcaccctgtcagacttttggtaacgagcctctctccgatgaaggcatcaagttcgatgtacttggagtggaggtgtggtatgtcggttcttgaacagccgcatatgtacagcctgacgccttacacttgatgtataaagaatgcctgtgtcggagaggacatacgtatggaagggatatctattttgatatagacagggccgacaggagcggactgtggcatccatcgagattgaagacccggatcaggaaaagtagttcatcttaatggcccttcaaatacccagacggcgatgtggtgctggcctccctgcattgttgattctgctattgacatttgccttaatctagtgttgcttgttttgcctaataacttttgtcttgaactttggataattcacacaaacagctttgcttttttgttatcatcaagctagatgtattttctggatggtttcactcttatatggcaattctttcacaataccgtcacttgctactcagtgttaattcagttacgcgtcaaaaagcactactcagatcgaaagtgaggaattgaaaagtaacggtttctattgctgattcaggaattctgtttgaaatccctgaaccaggtcaggaaggctgcttcgaacatggtccacaagaagactgctgagacgacgccgcaggttgccagcccccacaaattgccgtgtcagtgtcttccaatctcctcggtcgaagaactccttctccttctcctccctctcctcatctagcaagtggcgtgtctcggaagacttggtacacaccaagtgcaaccccagtggcacttaggatgccgatctttgatggcattcaaccataacgcttcctcctctggctcctggagtgtgtcaagatgggtgatgattcccaagatccttcctcggttaggataatacttgtcagcgaagtcgattaacttttgagggcagatgtcgattttggcggagaccacggggaggatgatgcaccgttgattcagcacgtagttttcaatcgtccgacgaccaggagtcttctctcgacctccattgtctatgccatctgcgaagaagagcctgggcatgtcgatgagagtcaggtcaggtttatcgggaccagagacctcaactctcatgacatcgtcactgaatccatcctcgagggagaatttgacgagttgcgttgcttgctcaatcagcgcgactgactgctcagtgttgtcgtgaacagggggatcaaatgattctaggtgccagaggtcgccttcgcttattctcgttgggccaggccggatgctcactttgaagcgaggtgttgggtcatagcgtagtatgatctcagtaacgaagccagtgtaaaagtcattccttgatggaaagctcacgccggaaattgattcaataacagagcgtttggcgttggacttggaaccacagatgatcatctgcggcaaatggacatatttactaacactgacggtacggagttcgtcgacgatgtcaaggatactgccttcttctgtgtatgactgaggtggagcttcatctggcttggccggcatggacatggtaaggtttggatgtaataggtatgttggaatgaagatggaacgagccgtatgtatttgatggcaagaaggatgatgaagtcatgaagataaaagatggaaagaagaaaggaagggaagaagagtccatcttatatattggccttatacgtttaacgttaacagcgtgcgattcggcgactcatgcgagtcatagatgatgattatcgcgatgatgcgatgcgatggacggtcatgcgccttgaaatgccctactcccgcgttttctttcacacttctggttaaagctattagtcgtttgttccttgctctactcaaaggtatgtagagacaacaatgctcacgtttctttatccccgaatggtaattagggcattccggactttatgtgagagcaaaatatattggacgatatgctaactttagggactttaagaataattgctgcttagtatctaagacctctgttcgctttgcatttctttgtgaactagagctataaggacttcggatacttctcaacagcctcaggtgctcgccgccttatccagcaaaccacgatcaaagtaacagttcagctgccagatttgtaggccatccgtgccgcatccctcctcggatttgccaatctcataaacaaaggcttggggcagaggtactattccccttccacctttgagatgcaagttgttcgtggtctcaataatcacggtatgtttgccagacgtctcatcgctcaaaacgacgattgaaatcacgtcatgtgcacaacgctcaaactgtccgtagagatcgatgtagtaatcccagatctctttggccccatggatgatagaccgatcagtgttcaccagggtcgcactggaggcgtaatatttggttgggggtgtggtcgtcttagcaatgctgaagtccactgcatatttcatgtaccatgagaggactggattggtcgaaaatactgagggtgggttggcgagattcaaaggccctttgaccacggtagtagtgacactcatggttaagaatatacccaattgaaatataggctgtgatcaatggagaaaaatcgtaagagagagagcagttcaaattattagtatctaaaaggaatatcatgatatcaaagctgttataaccctcggctcgtcgtcgggatgataccgaggaacatccgacctcgggacccgtgaatctcgggaatcccgactcaggatgacgtaacccgtattgattcaaacacaccagcatgaaggcagaattgaattgtaaggcagaattgaattgtaaggcagaattgaattgtaatcaggggaccaagttaaattacatttatatcagctatgtaccatggatatcttggtagctttcaaggagctttgacctcgacaagcagttttcctgcgagatgtttagtataaattcattagtgtgcagaaatcaaagcttacctgtgtttacccccttatacagttgcatcaaggcagtttcggcttgggataacccgccatgcacaatggtttccctccgttgcagtcgaccctccgcaagccactggctgagcttccgtctgatctcaggtttcttatccatatgatcgaagacaatgaagccttccatgcgaatccgcatcctccatatcatcatgtagttctttggtcctttgacctcctgttcattgtactgactgactccaccgcacatgacaaatcgagcgtttttgttggcacagagtagagccaagtcgaggacttctcctccgacattgtcataaaagaggtcgatctttccttgcatcaaactcttgaacttttcggcgaaatcttcgctcttgtagttcagtgccccgtcaaacttgaggtcctcaactaaccaacgacacttttcatccgagcctgcgattccgtacacagtggcaccgtggatctttgcaatttgtccagcgatagacccagtcgcccctgctgctccagagacaaccacaaagtccccaggcttgacatggccaacctcaaccatgccccagtacgcagtgattcctgtcaagccaaggacgctgagaaaatcggtcaactggcctccatccgcaggatcaggcgtaggcacggattccaaagagctctcattgataattgcctgctcagtccaacctaccataccgagagcataggagccaactggaaacttctctgaccgcgaggcagttacacggcccacagcgtagccacgcatgatttcgccaattgcaactggaggaatgtatgaaggtcgatcgtccaaccacccacgcatcgcaggatccagacttaggtaaaggctttccaagacaacctctccatcttcaagttcttccgaagtaggagttgtatgcttttgtacagcaaatgtttccccggggacaatgtttgtctccgggcgctgttgaagatggattgcgatatgttcggaggacatctgtagataaacttgttatgagtatgatgaaaatcaaagcaaggcctgtaaaaccgtactgttcaagcagtcgcttatgcgacaaaaatatatttcaaagaattagaaagcgatagcctaacaccgttgtacagagagagtacgaagtagacaagaataaactgtttctgtggccccttcgacaggacataccgctttatcatcgactacgcgctacctcgggaacatcccgagatcctcggattatgcagccgctttacccgtacggagtaactatacggttggggtgtccctttaacaatcccctatatatataagcttatataagtcatataatgaataactatctacgtcaggatacatctgtttcgatacggcatatgatcatccggcaaatagacttccttatagttcgggaccccccaaggatccccggcgatctagcatcaggcccctaggtagtaaccaagaaattgctacctatcagcgggtacatggttctattctgataactaagacaattgtagtattaaattagccagctgaatgctatgggtccgacaaaagatgaaccatgccatcaaatctcctccttttcatcttcttctgcttctgatccattaccgtcgcctgtgacgtgccgggtcttgcaagatagaagagtgcattaaattcagaataactaagatagggagagaaaggaaggaagcaagttgcaaggtaggaatcagccagttcttatagttgagtcctgaccgctttgtaaaagatgcaaacaaccaactctcgcttagcaatagcaaacaagcaaaaaaacaaacaagcaagcaaacgttggatcgtaacatcgccgaggggacatcaccttccccttaatcagtcacaccttggaaaagtagccaatcatcatcagcgagctccgtgtctgggtgatcatgtgttggaagatccaagattaccgcagtgtattccttcgtggttgccactgggatgggccatgaccatttcgcaagcatattgagcatgtcataaagcttgcccttgtcgatagtatcaatgtacggcgtgtcctcgggcggtattacggcgtattccttgaaatccaaaatgcgggtgaactgaacatggagttgcccatcaaaatatccagctaggacccgagagtgccaggaatagacgagggtgaaacgtcgccggtctcgatatctagatgatgaaactggatccgaaggtctaatagtttctcatcggagatgactggattgtagtcaggtgagtagaaatacaacgatttcgggtccgaaggaacaggacgtagggctcggagaataacccaaatctcattgccggcaagcgcaggacgcccctggccggtgtctagcttaggacgtccctgatcggtgtccaaattgaaaaaatgatccaggtcacatgaaccagtttccatgttgatgataagcgttagtttgtatgagagtgtagtagaaagacacaaagaatgggtgacgaggctgtgcgggtaaatagaagaacaccaatcggcgtgaaaacgctgctaaaaaaaaggtgagtccttgaaaacgaaatcccatctagattctacgtcagaatgggatactagtcctaattcgaacattcatgctgctgaattcggtaaagtaggttatggtcctcactgatcatcacgtgatggctctgagcaactcagtgagtctcccggactgatatttactcgagcctgactctaagcgccctcataaaagcggcagctatgataggaaagccccaactgacagagatgatctttacttttcgcgagctctgattcggggttttgatatactagtgagcgcatactatttgcagttgacaggaattcggttgggattcggatgcagaggttctttgtgaggtcattctgatgcagagctgtctgcagtgcccctggattgtataagcttcagctactaaaccagatttggtacctgtctatagacatacacttctctttgatcatttcatttcggggtgtctcatcacctactttcatatagtaaacatatatttctctctgatctccatatcgccaaaatggagcaacacgacttactattcattgtcgatgcgtcaagccatgaaaactgctatctacaatcgctgaacatctctctccctcaaataatttcgatttccgatcaaaagattctacataactagggaacgcaagtgccatacggccgtcaagacagctctgtcgaaaccaagggtctcctgctccaaccgtccagtgtaaaaagtgctcaaatcatatgatctggcccgaagaatacaggccttccgcgttcaaagagtcagacttcatctgcccctcttgcacgtcaggccttgtcccaacagccaagatcgaagtcacaccatatgcactatcagccgagaacccatactcctggctagtccaagatgcaaatgaccagcaagcatggcccttccgggacgactccatcttccaaaccatcagtagaatgggtagtgaaggattcctttccagaatcagtcttttcccttcatctaagtcccagctacgctacaatggaaaactgatccacaattctaaggcgctaatttcaatcctccaggaccgagtcgcaatcagcaaagcaagcaacgcaaaatgttcgatgtgtttccatagatatatgtgcttatacccagcctgtggacgggatggctgccgccaaaaaaatgtgtagcgtctgcctggtagtgtggtacaagttcaactctgcaggctgtgtgatcaaccctgcggtgctgggatgtccgttctgtcgtcgataccccactcttcgcctagtagtgaagtatggattgggtattcatgcagttgaatatttttcccaagcagtcggtgggaagggaaagttcatttacgcatggtgcaggaaatgtaatactgccaaggtggtgatggagcggagttgtatgcttagcaaatttcttgaattaacggactgggtttgtgatgagtgtcgcgaagctataaagagaaggcagcgccagacggtagataatgactgacgaggttatcaatggacaagaaccctccaggataagtaatcaatgggatatttcacttgtgaattgtctgaactagctagctaccttgcaggaaaagatctcgtttaatgagtaccacccttgagctccaaactaatatcacgtaagaaaaggactctcaaacaatgggagacaaagtactgaatgtgaagaagaccccatgtacaggagatctccagcggcgttagaagagcagaaaaccccccgcaaagaaatcacggtattggaaagacgggaaagcacaaaacatcagggggtatgggtaatggtacaaaaataggaaaatgaggggccgatgagagactggggaaaagcatttgcagactaataaggcgagttgacaacttcatccctaccaagacgactgctccatccactgcgcgcacggtttggtgtggcaggaccagcgatgctctcgcgcgtaggcttcatgaaggtacgcttggcgaccatgttgacttcgtttggcagagcaacgatgacattcttgtcagagccgaaccggaagttatcagccatgacattctcaccataccgcttgatggtgtacgggtccttgcggttggcaataaccttcttcatactccatgtaatgatgaaaggaccggtagcggtgacgatgctagtttccgttgagtcgacaccagtgttgaaacgtgccgtggtgaacgaaagaggctgtttcgtctcgtgctggaactgggcaacgtgtgcgggctgcaagccaagacggcggggttgaggctttgaatccttcgcgaaagcacgctcgaatccgagcttgccctcatttttgccttccttttgaagcgaatcaatgaggagaagataggtacggcaagttgccagcacccagcgtccatctgcggacacatcaagaccgataattggctcgccgagagccgggatatgagtcttagcattgatgcccagacgatcgaacatgcggatgtcacccttgttagaagcgacagcaaggtatcctttctcagtagtagccatagctgagaagtcattcttgctggcgtattgcttgagatcagaatcgacaagcttgttgccagagagacgagggtcgatgcggaagagggcgttcttggagacaccaacgaatggctgcgccgcggtcatttgcgcgaatttctgcgtgtttcgttagtttatccagagatagatttcagatggcgagacaacttacattctcgggagcgaatgtctccacggcgatatcgtcatggaccttccattcgtcgatgattttgccgtactccagatccatcttgaacagcgagttgggatcatctccattctgaagaatcatattctgatcctcagcatgaagcatgaccttcttggggctgaagagtttgccattaggggtctcgacctttgaaatagtcgtggagaactcaaggttgttgtgagcggtgtgcttgaagacaccgatcttggacccacggacaacgaatgatcgatcatgcttatagccaactgccagttgtgagttgatgtttccgtctgcgtcacgcgtgacaatatcttcttcctcttcatcgctgtcatagtgttcactgcgctgagcatcgtcctggtcgccatcgtattcctcttcggcctcttcttcttcttcctcgacctcttcctctggcttgtcttcggaatcttccatggtaaggtcctggaaggcatcaagaacataatctctgtcattctccttgactttagtccacttcaactcgttcagctgttcccatagcgcctgcatcagaccctcctggaaccgttcttccgaggcttggtccttgaatcgcaggagccatgagtacgccgagccatcttcactgtagtggttgaagatgaatgaaagatactcgaagttaaagacagggttgatatcggcgacgacagcttgtcctaaccactctttatccttgccagaaatctggagccagtactgccaagtaccaacctctgagacagtcgcaacaatttccgactcctggagcacaaagtttccagtggaaaagtcgaacaaatgcagctcggccttttccttgcagagaatctccttggcttcggggtgggctgcagacggcggggcagtagtcggttcctcctcaagagtggcagtcttgatctggcccttggactgagcgtattccacgtcttttgtcatcgctgcaactgaatcctctgccgtgaaggaatttctggtcggcgaagagaccgggctcgcagttggaatgggcttctcttcgtcgtatgagaactcctgtaactctgcctcggtagccctctgtgcgctgcgacggtgcttgcgttcgtattgacactggagggcggcaagctcgaaagtggcaactttatccgctgggaccgaagagtcgcagatgaattcaaagagatcaccagcgtcgccgctcaggtcatcccaggccaatatctttgcgcctccgtcgcggagttcagagcgaaagtggagggtctggtccaggaggaaaaccttctcgtccttatcgaggccgtcgccggcgccttcctcgccgtcgtcgtccgcaagttcttcctcgccctcttcataggctctctggatgacaagctggtattggaagtcctgtccggtacgtcggatcgtggcagcggcgtccttgaagataagctcagagtagcctttaggcgactgtgggcggacgagatacagctcgccttgggggatttcgatgatggtttctttcgaagcgtcaccaaacaaaaatttgctcactattgaattagaagaaaaggcggagatcagtttactagtcaaaatactaaataacagaaaaatggccttatatggaggagtttggcggggcatgaaaagcgcgttgcttaccgttgcggagcataaacatggttgcgaggggcagctgccaaacaaaaattcgtgaggcagttgagaggaggaaaagaggtaagaagaactgaaggaaaaatgagataggaaagagcggaagaaccaggcaccgtagcaaagcctcttctgcctatgagaaaaggataggaagaagcaaaagcaagtcttctcaagtgcaataatcacaatgaaaatcgcttccgtcatagattgcagggtcgtggctgttgtggctaattgctgaggtaagcataccgcctgcctgggcaacctagtccggaataggcaatatgctttctacattcatggctcatggatgttctatcattgttcactgtcttttgttaccttctagtcagaatttacagagctgggaaaggttagtgaagcattaaaaaggaacattaaaaaggcatagcagaactcaagtagatcacaccttgtacacgacaaccgataccagactattgatccaagcttatgttcatccatggatatctcaaccgctgactgcctccctttgggcattaaaatatgtacaacatgttcgttggatagttcacactattctttctcttcgttttcgtcctcgcttccttcctcaaaagctgcaatctcctctagctgtttcatctgttctgcttcggcatcttcttcgttcacatcttcatcaccattctcgacatcttcctcgccccgcttctgatctgccctcaaagcgccacctttccggggagggataaccttcatgaacgccttgccccagtcacgaagttccaaccactgaagcataatctcaatgacatggttggtggccagtaccggacgatgggccatttgaatgtactgcccgataggcaatttggcagttttgatgccctttgcaaccgcttccttgtaacaaattgccttgtgtcggtttttatccactagcgctccaacaatataagtgctgtaaggcttcagctcagtcagagtattctcactatcactgctgagatatatgatttcaccgtcctcaggcttcgcatcagtttgttcagcgaacggtccggcgagttgacctcctcgcggggctgtcatctgttgtttggccagctcgccagcacgtacaaagtcatcctgtagaaagcgaacccgtttccagttcttgtggcatgccagtacggtgtcaaatcgctccttcagtaatttgttgaatgacgagaatatcatgtgcccattgtagagtgcgcggctgttgtccgagtatgagcgcgtgagctgaccagctaatgagatgcgctctctatcagacatcagatcgtcgtagccgcaatccatgacgaatgtaagaggtaagagtgttgacttggtgtgcttggcttttttgccccgccataagaccaggagcttgttcgcagcttcctcgccgcctttttctcgtgcctctgcaatcatagctttgcgacgctctcgcttttgtatgatcttgtccttcttctgggacttttgaagcgcgcgcttttgctggtgagcttccgcacggcgtaatttcttcatttgatttttcgacattacagccggggccccctgagcatcttgagttgtaggttcattggcagtttttgtatccttgtgaactgtgaattccgagagatcgagaggttcgttgccaatctgagcgcacgcgggctccggctcgttgctggcaacatcatgagcgccagtcatggccgggctgagctcctcgtgggtggtatcttcgtcgtgatcgagtttggctaattttcgaggccgctcttgctcctccatagtggtatagtggaattggcaagcaaaaaataaaggtgggctgtcgactgactgtagatcaaaagttcaaaaagcgcccgccccgaaactcatcgaccaatgacctgcgccgcagccctcattactgtgcacaatccacgtgactatccagacccaacttctccaatcgtcacagcgactccacgctatccctctaagccctttacccgctcattaccgtcacaatgcctcaggatatgcccccagcggggggctacgctcaagtccagtacaaggtaagccatgcaaccgagtttccgggcacccaaggccctgcgcacccagcacacagacatccaagctaacggtttcgtttcttactcttcatagcggaacctccctgcccgcggcttcaagcccgcctactacatgattggcatgcacgttatcatggtctacggtttctacaagtacttccacggtgtccgtgagcagcggtacgtttcatccagcaagagactcccttcctgcctccgatcgatccgagagaacgaactgcaattggaacccgatgcgaacctgctagttgaagaaataagcgaattcaatggctgatatgtgttttaacgatagtgagctggcccgtgagaagatgtggtctcgtctgcacctcactccgctcctccaggcagaggaggaccgcgaccaggtccgtcggcactacgccgacaaggcgcgcgagaaggagcttcttggtaccaattccaaggtctacaactccgaccggtatgtttcatgaaagcgcagttggacgctatgtcattctcggtttatactgatttcgcttgccttgacagctttatccgccctaccttcgcctataccccctccagtctcactcaatagacagcctgacaatgtcacccttattctgagcgatattgtacctccgttacctccttttgactctgtatgatgccggtgttttgggatgcttggttgggtgaccccttgcctccatggtatacggactgaactgggcttttctgatcgtttgtgggagagctagaagcattgtggtggaagctggggtgaccttctcgaagcgaattcgaggagaacattgtagatattacttgcctagtgatggcttcagtttggtcttttgcaatatgtcttatttctttgctcgttcaaaatcttcataccctgttagaactacaaataggccgatagtagagaaagttatatatttgtgtctaataatatgtgttttttataatatcgtcttgcgaagcgccgctgcttgctaacgacgggggtagttgataaagctgcaacgcagatctagacagaaagcagggcgaaatgtgactgcgaaaataggagtcggaccgccaatagtgtacagaatagagagggaccattcatcgtgtagaatgaagattaacaggcccaatagcaccaccgcatatcccaacctttcgcagtccagaaagcagatgatgtttggcctatccaaatagatcagcaacaccaccaagatcgggaccatcattaatatcgacacggtggttctgctgctgagtctccatctcattggtcatgtacctctcctgcaatgctgaacgagccttacgacgttcctcgcgagaacccagcatcttcccttgctcggcaatactgatcccacgcaagggctcaagaagatccaagactaaaccacgctgcagccttggtgaggtagtgagatgaagtgctttttccgtattgatcactttcgctgcgctaattcctggcaaagtcaggaaaacagcacgaggggtctcgctgcagaagctatagagacaccaaattgatgcaattagctgagccaggtccttttgcatatcgacaaagtatgattcatgtacggatgaaatgcacgctgtgaggacatcagtacatatgaactcgcggatggtcgcgatggtttgggtgtcctgggtatcgttcgtgggcacaaagtcttgcagaattgaccgaatgacgcgggtgataatgctaccgctacgcgtatcgcgcatgcgaagagcatgcgtacagaagagcatgactggctcaaagatctggggggaggagaggacgaaatggcggatagaatcagagaggttcggtgtcggcaggggtgcgctaggatccgattcagtcccatctgggtctgagaagtcacgttccgtcagtatcgagtggtttatctctattcgtagctggcgggtcagggagtgtttaccacctctctgtggatcgaatagactggctaccatgatcacagcagagtaagtcaactggcgaaggacactttcggacttcatctccgtagtgagatctccgtccgaaattccattcctgcgttgttcaatgatttcccattctgtggtgactttacgatcaatattcgtgaacaaagccgatagcatgggaggcaagaattggctgcggaattgcacagggcagtcgtcaatcagacaacgcgagatgttgagaagaactgagaactggtgggaggatagatgcggtgagtcaacaaataatgcttcagataggggtcctgggagttcggcaaatccatagaagtgctctcgcatcctgctcatgctgaacagcatggagtagcatgcttcgcggacagctctgacttttcctcgaaccgatgatgcaaacccttcaagtgtagactttgatgttgtgattctggcgtagaactcgtcgcggctaccgatagaaataccagcctgccaaaatcgatctgtgaggatacgttcgactaccggttgcatgccttcgaccatattccaattggcaggattgtggaaggcatgggcgtgtcttagaattaaaagttagcttggtggcatgaatcagcattagcataaataattacctgacaagctgcagcagagtgggaagaatgagagggatcaattcgtgccacatatcgcaggcgatcacataggctggcgcagattttttgactcgatctgtggaaacggccaacatagtcttagtgccacgcaatggcaacagctagaatagaatgaatcagattggccctagcacggggaatgagatttgtacttcttacctggaactttctggtcatctcttcttggactaaccttccttcattatccagtgcaacctcggaccagtctgccagtttctgtgcttgtttagattgcatgtatggaccgacattttccagtccaagcatattgcaaaacccgggaaaagtggagctactctggcgaaattggtcgtcttgccatgactctcggatgggttggaggaatgcttcaagtcggttttggcgcagataaggatccgcattgattgcgcgttgcctgtattgagtcagtatgaagcaattttagatagagtagacaacaggaaggggaagaggagttacataatgatgagcaagatagaagtcaattccatttgcaatttatcatcgacacggttagccagcgtgatttctttgatctttggctcgagaaggtcatagaaggtctgcagtgggcaaggttagagagtactggacgatcgggatgtggaacatgacgtacgtagaaatagtctgcatagcgcatagccaaccgacgaagttcagagcttgccaatccatgaagctctttgacagcctcggaatacaatgggtattcagaatgatctggtaggcgtgacattagaatgtgttccagaaccttgagcgcaaatcctggatgattgtccaaagcccttgaagagatgtcgacagccaatttgatgactctttgtttaaggaccggatcctatatgaacagatgagttgagaaatcccttgggtttgggaaatatgacatacctcaaaagaccttagcatcagacttgaagcccagttttccaccgcatgttctaattccattcgtttagattcctgtcagaattagcaaccgatgattcattttgcgcttcatcctcttacatcacgttgtggtgcttttccgtgagccgaaacccacttgttgtagcccttgatgacagcctctaccactgcgaactgagcatccgctcgcataagaggaatcgaggatttggtgaaagtttccactgtaaaattaatgagtcgcaaagtccatagctcattagattgttgacactcactgctgaatggctcaacgccgctatacaagttgtcgagattggtgtccacccgggccagaatttcacgcaccgcttcttggggccgcttgaaggtgataatttcgatgatcgaggaacagtaacggcggtaattgccaacaaatgcatgtcgctcgggaactgtatcaatgtcctcgagtaagaactgcaccgtgggatcatcggattcagtcgggagacactcccaacgaagaagcctctgggtacaaatgttcaagaagtggggagtttgttcttgcacaaagtccatgttactgatttttgagtgctgtaacagtctggaccaaagatgcaagcaaggtatggagaccgtcaggctctggtgttgcatgatgttgaccatgaattgcaggaatggcggcaggttcaaacggtccatggtagaggccaagaacttggcatcttccaggcatcctgcaatatatgagaccatctcagagagctttttggagataagatatttgggatcatcaacgtcatccggtccgacgattgaccattcgtaaagcccctgaagaacaacaaggtattctgactcaaaaatcagacatactaactcgtgggagtcttcagttccgatgttggtccttccataaagtggatgaagtgcttcgattgcagagagaaccacctgctcatcttgacaaggcaaagcccggaaaatgctgggaacaacctgggaggcaatgacagctttatagacggaccatgacaaggcagatctcaaggtggccagagcctttatggccgcatcacgggcctgtttggagctagagacattctggacgcaattgtcaagaaattcgcggattcgaacgagccagccctcctcaccacaacgtggaatggtggggttagttttatccccagtgatttgctctacgatgcctgcaggggtaaagatctcgataagcgaccgattgagctcacctccccgtagtgacgaggcaatatcttctcggaaaaagacatcctcggaaagagtctcaagaacagcgaggataagctctttatgaacgagagatgcaccccagaactgaaccatgttggcatccatatccatccaatccagcccccaggtcttcttagcagcctcggcccacagctgggagatcttatttcggaaataggcagggtcttcggggcggacgttctcggcgagttgcaagatcatcatgcgtaaggtcttggcttcttcgggattggtgaagttgtattggcgaagaacgtgatcgaggagagtcagaccgaagtatcggacaacgggctcatactccatacgagaagccaaaaggaagccatttcgcgctgcggaatcagacgctttaaggttctccacgaactgcgaagcctcctttcgtatgtcgtttgacgatgcagggttgtgaatgagttgcagggcacggattatgtcggccatgccgccttccgacaactcctccgcagccatcttgtcgacgcgttgtagaagaatttgatgaacaaaaaagttaagtctcaatcccgtcctaatgtagtaggccgcgtctcatagctcagagaagataggtaagactcgtccggtattagtttagcagtcggacaccgcaatggccatccacacgcgccactcgctctttccgggtgtagggtggttcgaggttgaggaccggactcgaagttatgaatcgatatatttgcaatgcacgtagttggcgaagtagggtcgcgaaatggatgactcgcagaagacaattggtgacttgtcggctgagaattttccctgaagatcaacaagggcacaccgctcacccgttgatgctccgctgagtccgctcttcctccagcactggatagatgactcaatggagatatttcaatgttaaagaggatcagctaggtaacgactcgtacgatattttttggtttccttgttaataatatatgctgatctgcgtgattttggtgtcatcatagctagagctatgcccctcatcattgtttatcttatctcccatacccggtcgttgtatactccgacagacctgtcacatatatatacacttttgagtgagcatcaagatcggtcggaggaccatttgatgcccttggatctgaagaggcagtagaaattaattcaatataatgaagcaattgatttcaaattggcaaataggaacttcaactctcgagatacaactagcaatttcacattatgacacactggcccttctggcattgttccagatagctgacatcttggcctccaggattagcaaactccccaggtttgcgcttaagtccctcaatcttgatatcctgttgtccttcggcatgccaccatcgcaggcgttgtagcttgacaccctggatgtcctggacgtcaatgtcccacttgccgccgctgactgcaaccacgatgttactccctgggaaatggaactcaggaagataaatttcggtcgggccagtcgcggcggttgctccttcagccgtcagcgatagagtaaaggcacaattcctgagatcgaaaacatgactatccaactttccgctcacgtatgttggactcgggcggatatatgcctctgcggcacgatagccttgctgtcgtaaggatgactgggagaggtcactggagatcgagggagttgacaaagcacctttgagatcacgaggtccaatatttggctctgttgagctactctgactttcggagtaggccggggaatgggtgtcaagtgggcaggtggtggatcctgctggcagttcgagatcgtcgcgagaatatatagacaggtcctcaccattccagtgatcaccccattcgtggtcgttctacgccgtgtcagtaccattcatgttctgaggggcaaatacacctacttgcgtgacataaacccacagagtaaagccattggaagtactgccctccagtgcaaagtgatttgcatccatagcgctggtttggctactatagtctccagtcttgtacgcatttttgtcgtccatgtcatatggaatcccaatctccgtaaataccaccggatgactgcccatataaattcggctttcatcgcggaggaacttgagctggtcacgcaaacagttgcgaatggccgtctcgccaactttgagcgcaaaggcaggggtgaggtacttgccccggagaacaccaataacatccacattgtagagtcggttcctacaggagtcagtactgccgacatccgattgaagtacctcgaccagagcttaccaatgttttgtcaaaagagttaatccatcatagaaatgaaccgcatggaccatattagggtcgtcatcagcagtgccgttaagatctggcggtacctccatcacaggtggctggcagaacattattgcgtccggccagattcctcgaatggcatttttgtatactcggtaatgatccaagaaatatgtgttggtaaatctgtcatagtcaagtggctcacccgtctgagggttctttgagaagtaatctttccgtagaagggtgtctgtggccggatcccaaactccatgctgagcccagatgcactctccaagtttccacccagggtctcgttgccagccatatttgctatcatcgtagtcagttggcaaccaggctatctcgcctgccgggtctacaaggtttgtgccagtcttgtagggaccgaaatttccaaatgcccatgttgtctgttcgcaagccttgcctgagccggtgagcattgcttggaatgcggtcggtgaagtcccaagttgaagttgctgctccggcggaattactgaaatgtcttgaaaaccaatgatgccacgatgaggctcattcatgctttcccagccaatgatcacttcgccatcaagatcacccgcttcatgaattcttcgtgctaagtatgcacatgcatcaataaagtggttctggagataatcttggatgttcatcccatcgatgattgccttaggagcgaaatcccgcccagcccaaaacaaggtaaacatggtttgacaaaccagtctagtataatttgtgctccagatcatcttggggaactcggccgggacatcgtatgtgttttgtaccaaggcggcttccgtgtctctgaagcttttagggtttagtcccgctgcatagagcgtccacatcggtgccccagatcctcccgagaacctagaccactaagaaggggttagcatgaagttgtaagctattaagctattacccgggtgatcatatatactcaccacatcctgatgcgggtccataaagacccagaaatcgtatttcttagctatccggagaacttctatggtgtatgcaacccactcatggtcgtaaactcccggtcccgcatgctcaatggcttcccaggtaaagatgtacctgatagtgttataaccccatttccgaagccgtttgaaatgaatatcggcatctttcagtgggaagggacgtccaacaaatgagacattgtccccgtcaaagaacttctcggcaatgtatgaggggatgtcgggtgtctttgggtacttcgcatcagccgcaaggtttatccctcttagcgtaacctcccgattgtgaggatctcgaaagctctgtccctcaactctcagatgtagaggggccattgttgctctggttctacctaaggtcgagttgaatgaggtcgtagtgtcacgcgggagttcaagggtgggcaagttgaagaaacgaagtatagaaagttcacagcaggtgggtctgaaaataggcaacgctttccgattcaactcgactagcaatattgaaatgcgaacgagcgaatcttggtaacctttcaccaaggtcacaagtgccaagcttgcccgatacctgcgtgcaagtcactagaacacgtgattctgaccacttcaagaaacctcgcagaatactttgactcctcaagttgtgttcagcacgtcttctgtgatatcttcaaagtgattccttcttttatctgtcaatccagacgtccaacccaacagtgagctcattgccaactcgaagatcacctgtgtccacctttgataacgataagaagtgacgtatcgcgagctagccgaccgctttgctccaccacgacagattctccccgctgtctctgcacaacgggaataatgtcgagcaaagcggcattgaaagccgtgcgagcagctttggaatcgaaagattaccaaactgctgctgaaaaggccaaggagcttatcaagagcgagccgaataattaccacgcgtatgacaatccctgatccttcatgaaacatgactaactcggtttgttatttttttctaggaatgtcttcctcggtctcgccagcgatcgattgaataagaataatgaagcggaggacgcttattccgctgcgaccagtatcaaccccgacgataaaacggcatggcagggcttgatctccctgtatgagaaacagggtggctgcaacgatgatggttatcacaaggcagtcattgctctcggaaagatattcgccgacaagtatgcattgattccttcttaattcctgtgtacgaaaaacatagtgctgatgacttctagcgacgagcaagaacgctgccaagatctaattaacaaatacacgaagtcgatgaagaacaaagggacctctcaacacaagcatgcattggaacttcagataccgggctcacccctgtacgattttcttgaggggcggttgccccgtccatcccaaacataccagcgattgatcgagattaccgagcgtcaagaaagagagtttatcaatcgtgagattggagagcgccgaacgcgtcttggtgctcgcatcgaacaagtcacccaggaagttcggagggaagcagcgaacaagagccgattggaccaattctaccaaggaatgattgattggaccaacgacgatacagtacgccgtcaatacgaggagaagttgtttcagcgtgcatatgaggaactcggagttctgcctgacgccgagaagggggcgaagagagcagccgtttttaaggcagcacatgacatggtaatcataaaacatccgttcgaacccgcatggaaagtttttctggggtggcaagatgttcaggatctctcccagtatgacgttggccatctgcgtgagtacattgagttctttccagaatctgggctctcccaggttctcaaaggattcttattgagcgaactatcgccatttcccaaggagccaacggacgaaacaaaaggcaaggatggcaaggatgggaaggaaatcacagccaatcaacccgataatgaaaacgatgacgatgcaactgttacccaagaccctctcgtacttatggtcgagggcttggattccgctcgcgattcaattcttgcccaccgcataatggcagatgtctacctctctttcgaagagtatgagagcgtggtcaatgttgctcgtaaggggctactgtacatcgagaacttgataaagtacagtggagtcaagatccccaacaccattgatgccttgaacaacgcacttgccaatgccatgatttattatcaatccccccggtatcacgcagatgcgaaaaaaatatttgaggacatccttgaacggaacccaacctcgtccaattgcctacttgggattggtctgattttgaaagaggatcaggactacgcagaagctgtcaacttcctgcggcgatcactagcacgtgattcttctaacctcaagattcgtggagagcttgcttggtgtgaggcattgcatggtgaccttgaaggtggcctagccagtcttcaggctacgcttgaggatctaaaagaagctcaaccggacaacagagagttcaaatctgagcttctttaccgcattggttactgccaatgggagcttgatccgtccccagctgcccgcaaagatcgcagtcgtgcttatgctagcctctttgcttccatccaggcgaatatgaacttcgctccagcatataccattcttggtttctactacgcagactacaagaaagataagatcagagctcgtagatgctttcacaaggcttttgaactgtcaacctctgagattgaagccgccgagcgtcttgctaggggctttgctgactcgaaggaatgggaccttgtcgaagcaattgcgcagcgagtggttgactccggcaaggctaggccttcccctgggtcaaaacgccgagggtttagctggccatatgcggcattgggttcggttcaggtcaacaaacagcaatacagcaaaagtattgtgtccttccaagcagcgcttcgactcaagccaacagattatcactcatgggtcggtcttgccgagtcctaccaccactctggtcgatacaatgccgccaccaaggcctttgagcaagcaaagctattggagccagagctttcagctaaagaccaggaatatgtatggtttgcaaggtatatgctggcaaacgtcaggcgagagcttggtcagtacgatgacgctatcgctgcctacgaagatgtcctgaaatctcggcctggtgacattggtgtgactctcgcgcttcttcagaccttgaccgagagttcgacgaagagccttggcctaggtctcttcaatgatgcagcggagctcgcataccaagctatttcggtggccacctccctagtgcagattaaaagcgacattttcaacttgtggaaggctgtaggcgatgccttctccaacttctcatacatgaaagctaaggctggaaagctatccgctcccagctgcaaggctttactggcagtcgatctggaccctatggcccttgatgtcatgaccgatgttgatggtgtcggaactgattggctcgcagccaatgaaagcgaagagtcgatgccagctgaattctacgttcacttatccataatcgcatttaaacgtgcgctgcatatttctgcgaatgatgctcattctcaagcagttgcctggtacaaccttggttgggctgaatatttggcctatcgcactgtgcagccggatccaaccaagaaaggtaagaagtctcgcaagttcctgaaagcagccatgcggtgcttcaagagagcaatcgaattggaggcgagcaattccgatttctggaacgcgttgggtgttgtcactgcaagcatgagtcccaaagtctcccaacatgcctttgtgcgaagtttgcatttgaatgaacgcaacgcgcaagtttggacaaaccttggagcactatacctcctgcacgaagaaggccaccaatcatacaagacgttcttgcgagcgcaggccaccgacccagactattcattggcttgggtcggccaaggcttcgtatcacttattgttcgcgagacacaggaggcgaggggttacttcgagcatgcctttgacatctcaaactcatccgatattctcactaaacgccagttcagtctgacccactttgatcatctgaatgcggcctcttcatctaacgtgtccgaactcattcagccattcttcgcactgcaccaactctgcatccaggatccgtcaaacctgccgtttgtgcacctttctgccctgttagcagagagaatgggcgagaccgcagatgccgagtctagcctggaggttgtctgtgcaggcatggaagacgagtttgaaaagacagagtccccggcttccctttcgaggtattcccaagcaaacgcagatatggctcgtgtcctccttgcacgccattcatatgaaaaggcagcagagaaggccgagctcgcgcttaccctctctggggaggaagacgcagagaaattcgatcccgaagcttgcaagaagcttcgtctgtctgcgcatctgacagctggtctagcatattacaacctgaagtctatggaccaagccatcgatatgttccgcgatgccctcgaagaggcagacaatgctccagatgttgtctgtcttcttgcccaggtcctgtgggccaagggtggtgaggaaaaccggtctgttgctcgggagcaactgcttgactgtgtgatgaaccaccctactcacatcggagcagtcacccttttgggtgccatcgctctccttgatgcggaccgggacgccattgaagcagttgaatcagaccttaacagcatgatctcgcgtgatgacatcgatctccacgaccgagctaaaatcatcaaactcctgagtgccatctcagcaacgggactcaatgataatgcagccgttcccgaaagcatcaggcgcattggtgatgccactgctgccgtgatgcttacaccgggccaacctgccgggtggatggagttgtcggcagcatcgcgaaacccgtacgcagccgccatgactatcaaacgcgctctgcgcagcgtgcctccttacggtaatctcggggctgaggacctcagtcaagcctactcgcaaaccggcaaggtcggtgacgccttccgagcgatcatgattgccccgtggaaacgcaatggatgggaggaactgagccacaatgtgcctacccggaacatgtggacacgctgtacgggccataaatcagaggaatcggacgacgacaaacctctcctgccatggaagcgccgcacaggccatggacctgagtagtcggacgacgatttgactaccctgccactccacaacaacaagcgccgtacaggcgctagggctaaatgaacttgatgcacagtgtatttagttgaaatgtacatcagcttttagcgaatgaacatcacaacatcaaattcataagaaatatatccacaatagactaagagaaatgcaaagtccataccttaagattaattgcgaagtagaagaagcacactccgccatctgttcagccggttgagcccacgatgactcgtgtttcctcattccccttcggcgcctgcggtcttctccagcaacctagccttcctaccctccctccacggtttatccaaagcctcgatcttccccccgagcagagtaacagaccccggggaaagcaacaccatacctctcgcgacagacggattacgaagcaagagcttcgccccaatagcaagtttctccaatgctatgccatcgatacgctgcatttcaacagccaccgccatagttcccgccgcatcctgaataatcaggcggtgcggcccatacccactgttcccggatgcagtcgcagcaccgttcgaaggattgttattcgcacgattattctccgacgcctcggggtcctcgcctacagcgattgtgcgcacgatctcacggccgcggatcgcttcgccccgctcaacgcgttcaattgcttcgatctggctccatagactcgtgccgatgtcttcgatgtctagcacttgcacggggattgagccttgcagccgtcgctcttggaccgccgggtcgtgaatatcgactgggagtacgcatgatctgtgcttggagagtgattctctgatatcagaggcgaggagacggaatatagccgtctttgtgagggcggatgcggggatattgcgttgcgctgtgctggacgataataggaaggcactgagccagggttgggcgactgagagggatttggtgctcagtatctgagctgcaatttgatcaggactggtcatgatgtattggactccctcaggatcatattggcgcgtatggttattctaagggaactatcgaagtcggggaagctctcaacgtgaaaataaagcacagaccaccgcttaaagcaattgacctggcccgactctgttacccccgacaactccgacacacctcacgagacatcgcaatgtcgaccatatcttctccacgccaatccctcgcctcctctagagccctttccccgggtccagcctcctcccgcccatcactcgatgccttgaacaccagcgtcagcggggggctcagcgccgcatctaccccatccactgcacgagctatttccccctcactccatccccgacgcaatcgaagtgccttgcgagactattacaatctcaagccacctggggcgggcacatctgcctcccgggacgcatctcgcactcggagtgaagcaggagacatatccgacccagccagtctagcgtcagggacggagctcgacagtgcaaacttcgacccgcagcggtatgtcgagcacctattgtcatcgtcgtcgctgtctacggtgctcaaggcggagaatacgttggttggggatatccgcactctcgacggagagcggaaagcgctggtctacgataactactcgaagttgattcgcgctgtggagacaattgggaaaatgcggcgcagtatggatgatcgcggtgcgccgttgacaatgacgaaaacgctgggtccggctattgcttttgttgctgagactgccagtgggcttattaaagaaggcgaggagcaacggcggctgatgaaggaagccaagctggaagatgggacttcgagcaagaagagtgagaaggatactgttcggtgggtgctttcttcaccgcagagattagagaagcttatggcggagggtaaagaggaggatgcgcaaaaggactggaaagagatccagcatttactcgacgcttggggtgaggtcaagggggttgctgaggttcggacagcgtgtgagaaagtcatgaacccggcacgcaacgatgactgagcacctgcttatacatacctttcttcggccatgatccatgtgattgaagctcttgacaattgacttttgtcgaagtgagctctcacttttgactggaacagcggttgccaccatgaatgagctggctcattcatgaagatagatcgttcctgatctatacaagacatgatcagtcatttgtcccgacgaacattctacgaaatcaccgctgccccggcttttgggaatgccttggacacacaacctagacagagacaaatacagtacatgtttgaaagtttgtgcgctaatcctcgccgagtcacggctacgtttcctatcacctacgacgtcgtagctgagacgacgaaagcaaggagcccatgtgagcggaagagaaatgctggaagaaagatgaatttgcctctttggagaccacacgggcagttggcggctaagtcctggcggtaacgttcgcacaagcgtctaacgttaactcgccaccttcgagggcagacacccaaaccgccaactttgtttccgccctctaccatgcagagagcgcggtagtcacctgctgttgggcaaaggttacatctaaacagcgttccaaccaatcaaagcaaacttctcgagcctctgtgggcaaagtttcatcgagtccatatatgatgaagcttgcaatcgcattcagggactttgcagtcgtaaaatccttggtaactaaatagccaccctgtggcatgagcacaacctgccgggatgaataccgcatgtgatgatgtcgtcaccagaacaacgcctccttccagttgatgcgccaagctgaagtaactttgcacgctggccgtcaacggtcttcatagcattcaaattcttattcgtggcttgggtgtttggtcactgaccaaacattgtgcctttttgacctgttagcctagtgatgaaactcaagcaaccgcatccctgacactctcccaggcatgtatcatatagttcccgggagcgactgtaggcgatcctgggagtgtactcactccgaggagcttgaccttttactcctaggatcatgtcacgctgctcctgaaaattgcgcgctgctctgtgaggatctcacgtatgcgtagttgaatgatcaatattgaggaagctattgtctattctagatacaagattattttaaatacaagacatagcgcgaggaagcgaagaaaggatgcctcttcctccgcggtctcattggcaaagctttctcttgctcagtggcctagccttaccagcagcctttcggcgcgttcaactgcccttgcagagtcgcactggacgaacttcgtaatgttcctgccctttgcaaacgccattatgatagcagccattaagacgaagggccagtcttccacccttggctccccatgccggtttttgttcaccgcacaatgaacttcaatcattctctcaaacttgtccagccacatacacagccccggctgcgaaagaattctgaaaaatatctggactgccacaaaaccccgtactctatcgcatgatggagtctggcccaacttgttcttgtaattgaccatgattcgagggaccgaaaggagaagttggaagactggcaaatgtttgagaaaatcaattgattcaaaacaattagcttacgtccgaggttttcatctcaaacgatgtcataggtctgagaggacgtgagagcttcagccaaagctcattatccggatcatcatcatcaatatacaagtagccagtatccgcgctatcaccgtagactccactgtatgccctgtactcatcttgaatcttctgcgcagtctcagttgacagccacatatatctctccacaattcccgggtcgaccggcagaccgccatagataccaggggagtcccattcgcctctgggatgctgcccccaaggaacagccatatcagaaaacttgacagaggaatgggtcaaaaagtccctgggctccaaatcaggccccaaactcgttttcttggtggtgtcataagggtcgaactctgagatttttccgcttccaattgaacgctccctgacaaactcctccagatattgcaagtagtaagggtttctgctctgtttggcagcctcgaaataggactcacggggagggggattcaacgccatgaaaagcgattggtagtcacaaagtatggaggtgatcgcaatttgcggtctcatggaagggcacttgccagccagctcacgcaaagtgttctcatgaggccgcacaggccaccagataagccaagggaggcagtcagagtcatcgtcaaggtcagagatatcattgttcatgattctacgagcatttatcgcagtgcgaatctcgcgacgctcgcgctcattgccttcgctgagcaatttacctgggagaatgattcgcccagggttggtttccagctgataggcccaccatcgggcaaaacttgtatggtgataaatcccacgaagaatacaattgtattcaatttctgttctgagcctccgtgggtgcatgaatcgagcgtatctatccacattaccctcccatgcagccatttgcgttggaaggcgtttgtcaagaactggaagatcaggcgaaagaggcatccacaaatcctccgagtctcctgggccgagtatcgcatcgcgatctatttcaatttcttcctcgaacccaataaatccatcttcctcgatgtcaatatcatctgcagttgtatctggcaagttctctggaggaagaacacgctggctcaaagcccgtcggggcttcatattgccgtttagaaatgcgggtgcttgtgggcttgtaagattaaccgatcgagtgaaatcatccataacagcccatctttgaggggccgacatgatgattttgaagatttcggcgtcttcggcagcattacaggcttcttcagcaatagagacgtctggcagaagatccaattctttgtaaagatccgtatacaaagcagcagcacacgcgcggccgacttggtagcgcatagatggataccgactagcgagctcgcgataggtttcttccgatgcaaactctggataccaaatgcagtatggctcggtggcaggttgcatatcggggatgacgttactcatgatcaggcgagcattgcgcgcgcgagaaaactgatgtgcatcgtcgccggaacatagctcaatgattgtcgggcttgttgcaaattgaagtgagtcacggatcccgcgaatgactgctctacgatgccaaaaagaggtcacatcagacgggactttttcgccctttattgccgcgatgcattggtcaaggtcgtactcagcgggttgttgcttgcccgcgtggactgggaggtccgtggaggaaatgacagagctttgccctgcaacctgagtagctgccatgaggataaatagcgcaggggacgtcaggctgacgatttacggaaggggtctgcaagaacttgaggaggggaaaggcggagcgtacgcaggaacataggggccagggttactttcgtttcggatttaatgcatacaatggtgccttcatgtcttaatttggatacctgaattacaattacagaggcgtgtctgagaattaggcccataaagctatttctgccatacaaatccatatatcgcatgattcttagacgatttgaacctaaattcggaggtaatagcgatccaatgaattatggatatctcttcagagaaaataatacgtatagattcggggtgttaaaacttatgaacagtcactgtacggatactgatttgtaattttacagtacagcgtatgcagggcatgcagcattgggggccgcatgcccaggtggacactaatctgattacatggcgaataagacaaagaattacctaaatatttgctggtacaaccccaagcaaagacgatctaatccgaagaaagcgatgataatgcaggtacctggtggacagcagagcgaatgacggacgtgcgtggcagaacccgtgtttactaaatcctttcgctcacttcgttcgtttcagggcacaactaccatacatacactgggaactacgtttcagttgactctgatgcggtgctttgattctggctggggtctatttaatatgagagaaacatactagtagctgatgaacaatcgatgctggcaagtactggggctcgttactactggtaatacatcgagatgtatagggtaaaacttactagtagaataacaccacttgaattgacaactttgacattcttgtagggactttccggcaagggaagactttgtaaataacttcggagatatatctctgagaaaacagttgatgtccagatcagatcttccatgtcagaattctgttctatagagccccttcctatatggcgggcacggcacatttgtcccaaaaactttcccagggctttatttcttcccagtgcagaacattattgtcagtgtttgccggaccaccggtaatggcgttgcggttcccaagttcctcgccctatgtaccagcattagcgccctgcgagatggtctttgagagaaagcaacttacccaagccataaacttgtcccaggtggtaaggcccttgcctttgatcttttcagtgttggcggcaaatgttcttgggaagtcaactgcttggtatcgtggcatgcctggaacatcggtatctgcttcggccatcacaacggtgctgcgatattcgccttttttgttgggatcagcttcttggaggttccaaccctggtcgctagatagctctctgaccagccaattgtttgtctggcccttcctaagagccacaattcggcgggaaatatcctcggcgcggccaagacgatcagaaacatccccaatcgtgatcagatgcctatcatccttgacagccgcgaccttctgactgacagttctaataaatcggatgtgcttatctgcgtctgactctgagtcacctttcgaccccgagcctccccctccacttcctccaccccggcctgagatgaaagtgctggccttttcttccaactcagccaacttgggactgattgtcgatagtgaaaccgttcctttgaagttgtagactctattatctgccaattccttttgcgccctttggaggtccccttgagatgatggctcagttatggcaggaggaggctccagattagaaggtttactgagcgttctgagcatgaattccacataattcagaggcttgtccgtctctctgccgtttgagtccagatgtcggttacttgttcctgcgggtcctcttctgtctcggaaaggaaatatgagcttttgtctttcggcggtctgaatttggctgtatgaaagtgttgcaaagttagccatgacaacctgtaggtcactcgaaatattactaggacggcgaaaataacgtacacaaaaatctgataggcttcccacatgaacattttttcataaatatgcgcctgaagattgaagtcggtgcctttataattgttaagttcgccggggctgactcttcgatggtgggtgtgtgaatgatgattgggatgagaatgggccgaacagcttaagcccgtaagagaagcaagccatattataacgagtcccagaaaagagacctgggatgcccggaagagcatattgacagttcccaccaaagatagtcaagtggttcttgaggtaaaagtaataaggaaggactggaggatgacttgaaaaacgggggcagaaaagaacactaattcgttttatgcgatgtcctattgccccctctcccaaatgaaaagctccaggataataggttctatttttacggctcgattttgttcgaatttcggctttttggcgattcatactagcaaccagtgacggtcgcgcattgggcaagttaattttacttcgaacccctgaataggacccagactggagagaaaaaagaacaaaaacccgaaaaaagcctgaaagaaacctgaaatcaaccggaaagagggaagaggcgtgctccacgaggtagtcttacatcgtacaggtagagtgagtgggacgctgctatgaccaatagtgctcatttatggctcattatgagaattcctttctcaggtagtcccatcagtctgccagcctttgccagaagtccaattcaagcgtagaacgcctgaccgctgtattccgtacgttcaaatatgcgaaggtggagatgggattagtagcgggacttccgacaaaaactatttcaaaacttattcttggtcttatcttctataatttccgagcgccgcatcttacagggaaacaccgaatatcaagtgataagtgctgataacgtacttcaagtgtattcaccaatttaccccaagagagtctcattgctgctactctcagtcaatttcgccaaatcatccttcatgggaagaactattccatggctgagactcgatatggagtccaggcccacacgggaagtctctgtagatcaatcggacgctagtgttcacgcgatctgctgtggatgtaacctgggggcggaaaaaaagcaacttggggggctacagcccccggggccaaggctggcatatacatattagtgtactgacgccgcgaatcatttggacaggcctcatggattgcctccactctccatatagatcctgcggaatacctgcggactgtctcaggtacccggcagaggcttaatttcaagttttattcgcgcacgctatcgcttggaattagtctggcaatcgaaaccagccctgcagccccaagaccctgtatttgaggctgggactgtcgtttccctgaactaaagaccctaatggggtagccataaaagcgtatgaaacatccgaatgtctccacttgtactagtagtggtcttggcattagactctgcgtacggagtacatactagcatataccaatgtactagtctgggtatgaaatttcactctttctcatcgagaaggttggatccgttgaggtaaatctcctttcaaggatcagctggaaagttctggattggggcgcacgttccggctttattccaaagtgcatcgcggtacggtcctcagatgctgtacgggctgatgagcggtcatttgattgtcattagcttcataatggttgacccaccggaatccttgaattcccacagcgtatcgttccaaatttgtcatttgtcgtcaggtttgctcttttccaaggttgatataaatgttccaagcctactgggaacccgggcagtgatcagcaccacagcactttcaagttcttttcaagtttacgttcattccaggttatcgcctggggtagtatttgccttcattctttcacgatgaatactgcccttggggatttcatcccttttctttccttgagttttctctctcttttttctgttacaaatgccttcacccacacttcagcaagcttgaatgtcttgcctgcaccgggttgcccagagtcctgctcggttgtcggctcaaacccgagcaattggacctggattgttcaccaaagtgatttgagcatctgtgaccagccaatcctatttgatttccattttggagacgactcgacttctgattttgttgtacgctcctgtgctgtcctcgagcctttccacgagcagattccaagctcgaatatcaaagaagcgaaatggaccaatatcaacgtcactgattcggacgctgtaacacagtcgttggtagtatcgaattcttgtggagcatctcagcaaacttcagatgtgaccgttcaagtgggccctgctggtgctatcaaggataccaatgacgccaatgctgctgttaagaatctagcatcctacatgacaaatgtagcctcctgtggcttcactgttgttccgtcaaaggttggagaaaccgtcgctgcgctttatgctggagcggatgtctatccaagcagcgttggcccataccttgacagctttaccaaaaaccttgagggcggatctcagacaatccaatcatgcgactcaaactcaaagcaagacacgactattggaatctatatcgtggattcattggatgagctcgaggatatccaacgcgtcttcaagacgtggtctaaaggcgattgtcttagcgcaaacggtgaagagtcgataaaaacaaaaatcatcacgttggcatcctctggagtcagcaagcggtccgacatcttctcatcgatcgaggatctcatcgccccccggggtaactgtagaactatacaagtcaaactgggagatggctgtggctcattggcaagccgctgtggtatatcaggagctgatttcaccaaatacaaccccggtgctaagttttgctcgaatttgaaggctcaacagcatgtttgctgctccgcgggcactcttcctgattacacccctaagcctcaggcggatggcacgtgtttcacttacaccatccagcccaatgacaattgtgctgatattgcagccgggttttctattacccaggatgagatcaataccttcaataagaacacttgggcatgggctggctgtggtgcgaacgatctaaagcaagaccaaatcatatgtttgagcaaaggtaacacgcctatgccagctccgctcagtaatgcggtatgtggtcctcagaagcctggtaccaaggctccacctggggactataatggctggaacctcactgagcttaacccctgccctttgaatgcatgctgctcagggtggggcttctgcggtactacagaggagttctgtaccaaatcacccgccaagacaaatgctccaggagcctttttgagtggtaaaaacggatgtatttccaactgcggcacaaagatcgtcaacaacgagcatgctccagacaagttccttcatgttgcttattatgaagtcttcaacctcaaacgcgagtgtttgaatatggatgtcactgagatcaacgatgcatccttgactcatgtgcacttcgcttttgctggactgactgccgactttgacattgcctttgacaatgacgattataaagcgcagtttgaaaaatttgtcaaaattagcacatcctacaaaaaggtcctctcatttggaggatgggctgagtcgactgacgccgcgaccttccagcgataccgtgatgtcgtcaagcctggaaatcgtgacaagtttgcgacgaacatgctcgcattcttcaacaagtatgaaggtttagacggtatcgactttgactgggaatatcctggagctaccgatatccctggtgtccctccaggcaccggtgatgagacgaacaattaccttgctttcttgaagctgatgaagaacaagattggtgataagtccctttcaatcgctttacctgcttcctactggtatctgaaagcattcccaattgacaaaatggccgagtatttgtcgtactttatctatatgacttacgaccttcatggacagtggggtgagtttaccacctatcttcccgatcgatgaactttactgatcatatatagattatggcaatgccaacgcaaatgtgggctgtcccggcggagattgtcttcggtcgcatgtcaataagaccgagaccgagaacgctcttgtgatggtcacgaaggccggtgtacccgcaaacaaagtccttgttggaatttcaagctacggccgcagctttggtatgatcgacccaagttgcactggccccatgtgcaaatacggcggttcctttgatgtttctacggccgaggctggacagtgtaccaacacctctggatacatctcaaatgctgagttaaatgatatcatgtcgaatgtgaacgcaagccaggaaggctacaagggccgcgtgtggtatgatacggaatccgcttcagatatgatggtttacggtaccaatggaaaaatcactacgtgggtggcttatatggccgatgacaccaagaacgaacgcattgactgggtcaaagggctcaactttggcggagtcactgactgggctgtcgatctccaacaatggaacctgggcgtggacaccgactctgaagaggccaaggaccttcaactagccgatcttcctaaggggtgtccttccgacaattggccggacagtctcgataagctccaggctagcatcgattctatcgatgtagaatgtcggtctcaggctgttgtttgggttttgcttaaaacaatccccacagttctgcaaaattacaaagatgcatctgaaagctatgatgaatatgttagttcaaggcctttttgatactggtgcaatcaagctaatctgcttctagttcggttattattccgaatgggtcaaggacaacatcaacgattcccttgagaagtttatgtggggtgatggaatgaaatacatggactgtaaatggacagcggacaaagcagatggtggcagtggcaatgatgcttgtacaaagatggttgttaaacagggacaaccaagtcaaggcgttgtcactatcacatatacggtacgcgatgaagatgggttttacaacgcgcttcagaacgattacggtatcctcaaagactggattgtgtgggaggagacgtcgggagatccggaagacgctccttgtccctgtccagtaccaggccactgcattcaatgcaacaagccccacggcgaagtgtaccacaactggccacaaaaggctgccgatgatgctatcaaggttcctaaccttaagtctgtgatcgacactgcagtccccaacatcaccgcacttcaaactgtcatgctcggaagtttcacggagatacgtttgggggccatggatgccaccgacgcagacatggccaccgcgtacagcatgcccgttttcatgcttgcagacacgaccgagcaaatgaagaatattaccaaaatcggcaaggagcagaaaaaggccgatgatgaagcgaaagtcagcttcatcttggacattgtcagcattgttctcatgattattccattcgctggagaagcagtcgaggcaattggtggcgtggcaaacgttgcccgcgctgctttggtcatgggcgaggctggtaacgcggctctttccgtctacgatattgtcaaggatccatcctcagctccttttgctatacttggtctacttatgggagccgatgcctcgatcgtaggcaagtctgccaagactaccttctccaaagccgccgctttccggcatgctatgagtgacggtaccttgaagtctttcagcaaagagttccaggcaaatgacaagatcgtgcaagacattgtcaaggcttgcaaagcctaaatttcatagtttttgctctctatggatgccctacagggtaggcctgaaaggcagctgctactcacaacaaaagcctaccaataaactttaaatcacatgcttataggaaatgcaacaattattgatgcattctgacgtgctcactgtttccctatgcagtttgtagccctttatctgtggcatttattcccttttctttctcttctctggcagacagcttgccgaccaacgtgcagcttgccgttcagcttgctgcgttggcattttctttatatgtctgcagatatgcttcttctgttttctggtggatggaatctggctggctttgtggtgcgaagctatatagacaagcttcagtacagtagttagtttcccatcttccatcaattcatcattaatcgtcaatcaattcttcaatcataaacaaactcataatccctatttcccttcaagcagctcccgactcgaatacatactcgccttcagtccatactcattcttagaggtaatatccagatgagtgaacgcatcagacttgtagtaaatcgacctcggccctttcccaacaagcccaagatcatccaaattactcacaacccgcttaacatcctcgacatcgccgaaatcagccgtatagacacaaatcaaacgactcgctccagacccaccattcgtagcaactttcacagcatccccgagctcccccttctccatcgccctaacaacgacgccccagaactcatcgacttgacccacagtcggaaaaagcatccacttcccatttgtaacacccgtctccctcgccagatccagaatatccttctcaagttccttccgcagcggattcaatttacgcgtcaacgcagccgtagtcttcgccccagacctatcatgcgcctcgcgcagtatcgcactcccattttcgtactcctggagaagctccctgcctctcctaagcagagcgggaacgtccccgctcgtcttcgacggcagatgcgggttgtacatccaaatccaggggcctacgaccgtggtttccgtcgtcgatggcggaagacgcgataaaaagtgatctaccggctcggtcttcccgcgtttgttgcgcggcatgctgtctgtttctggtggtgcatcgctcatacaaacgtctggtgatgtcgcctttgcgcgagtcgacgacgcgcggagatgctgctgcatggtggatagcagctttgggtgagttcctacccagaatggctctgggtcgtaggatgagacttgtgcttctagtttggtcttttcgtcgtcgtcgcctgatatggattagctgggtttcggggatgggttgaatatggaatgggtttaccgtagaagcttgattcgtcggagaatatttcatcggttgctgtggttgatggcattacctaggcgtcgctggatgatattatgatgctctggtggttcttgttgagaagtagttggagatggggggagtagttgagaagtagaggtgggcccgcatttgaatttcccctctcgcgactttacgagttcacctgttaatgtctcatagtaactaatactttgatttgaagtaataggaagactaatttaataagtatatgaatatgacactctttatgcattagctatccacagtctttgaatatatttatagcagcatatattctactatcctacttagtcccaacttattcggctctgttaatatcaattcatcaagcctttctagtgccgtgaaatgaccaccctataatattatgtctaatagtacactaggcgggtagtaggaaatctccaattggggtctttagtcgagagccttttactatttacacgccttatgctgtatttgaatcgcaaagcaatcgattattttagcaaatgattcttaagtaaagtagagtagaattttcaatcccccctctcccttttaaaagtccgctgccaccaggatacctggggggcgggcttcaatttcaatgggcaaaagaagcaatttgccaaatatatagtgtaagccgaatattcttttagataggtgccttcgttcacaacatccacattcccgactacaacattcacctcgatccgaacaatcctggaccatttcttcgcgcataaaccagtctgaattacgcctgaagctatagtagaggtctttggagtccaagtgaaacctatactctgcttggtaaagggcgtgctcctttatagtttattgtgcttggatctcttcaagctgcttatttgcgttctcaaattcagttgtatcagagttagacttcccatttgattcgatagccatagcctttggtagagctataaccttatgttgtagccattcctcacgctgtattacttcacatagagcgcgctcggtagttaagaaataactcagtgagtttagaccgaacgacgtagtttgacccgtatcttagatattcatctttttggtaaaagtcaaaggttgtaccaccgaagaatcccataatcgtatttagaaaagctgtaaggttagtatggtggttacacgaatgcagaccgcattgaaacaaaacaagacctcggccaatcaaccgatgaaccgaaaggacaagcatatagagataccatattaatttacacaaactggttaaacatcacaaaagacgccacaaaagacaccacaaaggacgtacataatagtcgtatcgccccggtggcatattcagtcgcccgtagacgttgtacaatcggcgattcgtggttggtgaagataccgggatccaccttaccccgcgaggtataaatcggcagtttctctctctcttgggagcacacaacaatgaccgagccaaagactgagagctcgcagctcgccgattgtagtcatattccgatcatcgacctctcaactttggatagtccaaatttcgatgagcgacggaagcttgctcaatcgatctatgatgcttgcactcaggttggcttcttttacatcaaggtgtggctcttagggcgctcttgaacctgatcagctattaattttgcccgctcagaaccacgcaataccggaggacaagattaatggcatacacggttccgcgaagcggctcttcgatctccccgaggagcaaaagatgaagttttatattggaaactcccccgtacgcctggaaatctgaagttcaaaaatacatcctaagattatactagaaattccgcggctacagtcccctaggtggtgagaaatccacagggacagacgatgatcccattgccgaagaagatgctgtcagcgctctctctgaagcctttgacattggatacgaaactgcaatggatcctcaaaaatcgacagatgaccctcttccccgtgatccctacggactgtatggagataatcaatggcccagccaagatatacttccaaacttcacagagacctatattgaatattgttccatgatgctcgggctctgccgaaagttgatgagaatatttgccctcgcattgggcttgcccgaagaacactttgatgcgatgactaagaacccaggtgtcacgtctaggatgatgcattacccgcctcagccagtgaaggaagaggttcgtgaaggactcggggctcatacggtaggcaattgaccaaaaggcaacaaagataccgaatgatttacttatccgctgtcaggactttgaatgcttcaccattctctcacagggtagtgtcccgggcctgcaagtcttgagccacagtggtgagtggatactggctccgccattgccaggaatgttggtcgtcaacattgcagattgcctgtcaatttggtaagactagctcggtcattcaggagaatgcgtgctgacttatttaggacgaataaaaagttcaagtcgactattcatcgggtgacaaacttgactggacaagaacgttattcgattcccttcttctttggagtcgactatgatacaacagtgtcagttctaccgaatcatatttcggatgatcggcctgcatgtaaagagcccttcaaagcaggcgaggtgagtcatagaatgggttgagtaccgatgtgataactaacgagggaatagtgggttcgcgaaaagctatcaaaggcgtatgttggctatgaaggctaggatactgaatcttattgagacataatttccatcttgcttgccctgctaaacttcagtcatcctgcactggaatatgttgttcaaaggctgatcacttcttcccaaataattaatcccaaccttcaatcttctctaaatccaaccctaggaatccaactagccccggtgaacaagaggagtttgtaagcatagtcgcggaaccctgcacatgacatgacgcagttgcctgatcgagctatgtgacaccagtgggtccacttatatatagattaggtagtctcctcccgcttccctcttctcttctcctcctctccttgtcgtccatatttagctggatggataaaagctacttacttcgcaatgtctttactattcagttctccaccctctaaggcgacggcctcccttacaccgttcaaggccgccatccctaaggccaaactcgtcgagctcgagacgttgataaagatagcgaaagtagcaccacccacctacgagaattcccaaacagaccaccgttatggtgtcaatagggattggctagtgaacatgcaggatcagtggcttcggtcttacgactggtaatgatactacagcccaccatatgtacatcccaatacatgttgagactgaattattatactaggaaatcctccgaggatcgaatcaacagtttccctcagtacactatggaggttgaagatcttacaattcattttgtaggattgttttcggaaaagaaggatgctgttcctatcattttgttgcatggatggcctggtgggtctatcttggtcttaacctcacaacaggaaaatgagcaaaacagagactgacatatcattaaagggagcttcctcgagtttttgcctatactgcagaggttccgagaggaatacacgccagaaaccttgccctatcacttgattgtaccttctttgcccggttacgcattttcctctgggcccccattggatagggactttggaacaggtgacatcgctcgtgtttttgaccgactgatgaaaaacctcggctttgagagcggatacgttgcccaaggaggtgatattggaagtcaaattgccaggcgtttgggcacggagcatgaaagctgcaaaggtacggaaaagtcatggtattccttttgcggtgattgagccttctctgacaagttgtgttatagctgtacacggtaagtgcttttttcatcaaagttatttaaagactagaatacgaatatcagctagtcaacgcggttttcatgaaaaagccggacggcatgacagacgaccacctgaacgcctttgaattacagggcatcgagaatatgaagaaattcataactacgggcgtaggctatgcgattgagcacggcactcgacccagcaccatcggacaagttctggcatcgagccctcttgctctactagcgtggtgagtcgtgcaaagcgaagcgtagtcagcagaaatcgcaaacctgacacctgcaggattggagaaaagttcctggattgggtcgacgatccgcttgccctagaagacattttggaatctgtcaccttgtactggcttacggagacgttcccgcgggcgatctatacttacagacaggtgaatttccctattattttcgacttccatcagcagatatctgatgtgggtaaatagagctttcctgcgccaccggttatgatcgccaatgaccctcgttggtatatccacaagccatttggattttcttctttccctggggagcatgttcgactgccgcgctcgtggattgaaaccactggagacttggtattctgggagcagcaccagaaggtatacgatgtggcatttgaagagccgagatttgatactgacgctgtttcattatagggtggtcatttcgcggcactggagaggcctgatgaattgaaggcggacctagtcaagtttgtagatcaggtgtggccaggtattaagagagccgactaagttgagactaataagtagggcagtagagcatttgccaattgagttaaaattgtctggagtggaaagtattcaggaactgtgagtagctgatgcaatattaaccaatgagagtatatttagtcgcccgtcaacgtcgattccaatagtaacattaatttaaactacgttcgcactttgttattgatatttttgcatttcattttctatctcatatgtactccgaggcaaatcaaccttactaaagtactcgtatcacaataaacgattcttgggactagttcgaacgcatattatcaactagccaatgtttaaaccgaagcttcgggggcttcaggtgaggctaaggtatccaaccaaagccaggaaatgacggcctggatgaggcaggtaatagctgcaccgggtgagtaaattgaacgatacgttatggaaagcatgactcacctagtgccacagtcatgtaaaagaagccaactccttcgaatagcgagccagtcaatagaggcccgagcatcattccgagactatatcctacttcagtcatggaaaagactcgcaagttgcttctgttggcctcgaatagctgcgcatctttagtttccatgtccttgacaacatctattgaaagtcacatttgttagtggaggaacgaactacacaaaatgtgatcactcacaagccagttgcacggctcctacgccgcgcacaagaggtaggatactacccaaggcaatcaaactggtggtaaaaatagactttccagctgcatctccttcggcccatgggaagtgggagtctccgggcatccctagaagtaagatgagagggatcatcgcaagccagccgaagacagtaggtccccgtattccgactcgatcgcgaagccatccggatggaccgctgagaaggatattcgggacttggagacagaagaacatcatactaatgagtaaactcttccaaccgaatgcttgtcgcaggtggacagggagagtgttgttaatgccagacatgagggaggagacaacgacgacgttggccaatccggtcaaaacacgtggatcggagagcatgattctgtagtactcatgtttgaggtcatgcttgttctccactttacagtcatctggattgacggtagacggtgcctcagaaagcagtgcagtcgtctcttctgggtccacctcattgctgaccactgacacaacaggcttgctcaaagaatcaattttctttgacgattcgaggccaggctcaatcattaccaggcgtgcaatgatatccaagacgagtacgatcaagggaagtgaccaggcggcccagtagccaaataactggagcaatgcgccactcactgttggtccgccgaccattcctgccgttacaaatgacatggccatgcccatcgactgtccaaggtgttgcttgtccacattatttgccaatagagcaaatccaaccacccaagttccggcacctgccatggattgcaggatgcgaccaaggaagagaatccaaactgttcacgaaatcaatttcaaataatcatcatcaagtttaaatattctcataccggatggggcaagagcaatcataagggtccctataaaacatcctgccagggcgatcaatagtggtttcttttggctcggagtcttctcggcaaaatgcgcgacaatcggggcagaaacgagaccaatgaacccatgagtggtgagcaatgccgtagtgaacgtctgagtctgtgatggatccaggtgcagtcgttcttcaagcatataactcaagatcggagtaagaaacccgtagagaaatgtttctgatggatggttagcatgactcagagtgagaaccgtgaaacaaccacacacctgcgaataaggcaaccgtgatggacgaaaccaccaaaaggcgagatgaacgccacctgtagccccatggctttgtatccttgtccattttaatatattgagagtttgacaagagaagaatgaaaaagtggggggcagagaagaaattagttaagtagttttcaggcgctatgatcacaaatagaatcccattatatcaagctagctcatggagataacactattttcgatttcgtttacgagccctgcatgtttagttcgtctttctagtgccggcaatggctttctattggtaatgcagttcagatcgtgctcgcgtctaagccgaacaccctgatcgatacctcaatgcgcctctaatgcacctcaaatgcagctacaaggaaggcaacacggaaatcacaacgagtgtgtcacacttagagttcacgccctttttgcagatccgtcttatgtactatgtactatgtacaagcatacacatcctgcaatggtatcccgaacagaacttcaagagctcacggaacatttacatttcaatcgcgattgatccacttaccccataagtgtcgagctattacgcaaatctgccaatgtatctagacgcacatagcccgtcggcaaccgtcggacctgccgcggtcttatgtaccaagtatgactaggcagatcaaagtagtatcggcaccgtagcttgcgtgttcggtcctctgatctgaaactggtaaacggctgaatcctcacggggtagaaaaacggggtctacatgcaatgcggtgaaacaatgatagttcgagggataagccgcggcgtgaggcatgcatgagacagatcttactgcaagtccaactttgagggtgtatatcatcttaaattctgatagtaatgtattgttctattcaatatatattttctctttggaatttacttggtaactccaaatgcaaccaatccggcataccatcctagtaggaactatatatagcgactataatgtagtatcggttctaggcaatcgctacaaacagtgagtcttattggtgggatactccgaaatggctaagaccactcatataaaacgccaagtatacttagtacacatccagactatcctctgtagacgcgatatcctcgacttcaaggtggatatctcaccgccccactatgtgatttttgactccaaatcctatcaacgcaacagattgagagcaacgagattgtcaaaggatctcatttcgttcatcgtgtgcatcgtcggagtggaaatagtgtgtcacgcgacttgaacttttgatatacgtaccctgtcgcggtgacattgtcggacatattcaagacgccacattccgccccctccggagtcgacagctaaactccgagacttgcaagggctaaaatcattctaaattcggactagagcaaaatgggaagcattcaacatccccagtcggcgactacagtctttctagaccagccacccagttgcctggagttctgtcccgaggccccagactatttcatcgtgggcacctatcttttatcagaaaacaaaactgaagatggaggaatcgagcagtccaaaactgggagtctacaactatggaaattagaccctgttagcaagacattgtaagctaaccgcaatcaatcatattacctagtataacgccctcataacaaacccactaacagcacttagatcccaaatccaaagaattgccctcccatacgcagtctttgacctgcatttccacccaagacacaagaacctattcgcaattgcaagcagcgtgggatcagtggctctattccaagtatccaactccaccaccggagacgcatccgcaactccaactccaagcatcaccgagatatggacgaaacaagtacacgaagacccctcaatcccagccctatttctcgcctgggcaccgcaaaacttgttcccgcagctcgcagccgatggcttcgccgtcacattctcagatagccggacagccgtcttcgggacagaggaggacatccgccaagaacagagtgtagccgaatggggcacatacgaagccaaacagatgatcgaagtctggtttgtcgcattgtccacaagcaccggaagcccaactgcgaagtccccgatcccgttcatgttcacggggaatgacttcggctcgctacacacgcgccgtttcgataataccgccgagttggatgatccggacgagcatgtctcgcccatgctgctcgagcatgatgatcgcgcccgccaccacactgctggtgtcactgctatcttgcctcttgatgttcccctggttgatgatgcgccggttcttctgacggggtgttatgatgagagtcttcgtgtgtaccatgctacgcggaggggagaggttctcgctgagcaggagcttgagggtggggtttggcgactgcagttgttggatacgacgaggattccggccgaggatgatgcgtcgaaggtatccgagtaccgctttctagtgctggcgagctgtatgcatgccgggacgaggcttgtacgggttacgtgcaagtacgaagatgggactccgaattgggagattgaagttctggcgaagtttactgaacatgagagtatgaattatgctagtggtgtgtgggagggtggacaagatactactgagatattgtgcgtctcgagcagtttctatgatcgcaggctctgtgtctggactgttgatctatagtcaaataaaaagccatgccaaattgggaaggccatctagacgctgagactataccgtcagcaggtcccggtttgtcgactattgtaatgctactggagattcgtaagccgaaattattctaacatgattgtagtcatgaacacgctagagaatgcacgatgcataagcgacaggtatacaagtacagccgcgcccgaagacaataaaagagtcattcatatccgaaaaaagtatatcgttcccattgagcgtgtaattagacaatagtctccagctcgcgagcataacccaaagcattctcaataacggtgccgctagccaccagaatatcccgctcagacctagcagtcgcctcgggctcaacagggaagtatatccgaccgtcgcggaggatccagccgcgctgcttggcaaattcgatcactgcaccctcagactcgaggaagaggaggttcttggcgttggaaatggggagggaggggtatgccttctctgagcaacctgcgatttcattgcggatagtaccgatgagaacctataaagcttatgatcagtatgcttgccgacagagacattgagctcgagctgagcacgcatgcaacttacatttgaaaacagaccaaagtcttccgacggaacacgttcggacttcgtctccctccacaccttgtcatagcttccctccatcaagttgcgctccagctcaactgggtacttgatgcacgcatcatcctcaacactgccacccttcaagcacgcctcttctaccaatccctctagcactgtgtggaagttggcactgtcacccatgctcaaaagaagaagcagatacagccccgtaatcttgctgcgctggctagtgctgaagtcgagtttcgaagagccctgcccgggcagaccggcatgtctctcaagatcgtagaatggctgcagttgctggtagtaccgtgtaaatagctgcgcgtcagtctggcggatggaggcgagtgctccgagttcgaggacttggcgggcaaggacgacaagctggggaggtgtggaggaagtcggaatcaaagcattttgcataagaagagctcgcttggaacggctgagaaggtcgttggcgacgtcgaactgtttgcgctcgatagcaccgtggagctctgacacaagggactgtagatcggacatgatggagattgtgtgggttcagggcaatactgaaaggaaataaggcagcctagccggtgtatggcaaaggcagtaattaaagcagcggaaacgatagagagtttggattttgattgatgattgttggcgacattccgatgctcatgacggagctgtggtaggcggtcagcgtgcagtcacgtgtgggcattttgatagtcgctgatgatgacttccactactaccaccacaagtcaggctatataatatttgttattggattgaaccaaaagatggcccagtatcttgacagctatatatactattcaaattgatgtctacgcatggtcatccggcaatgcgtgtcccggatggcatacggatgttttagcctagctagaacaggtatggcgcaattcaagcttaggtatccaggaaaatagcaaaaggtaaaggtagatgcatatcaactcgatataattctgagaaagtaattcgtcactcatcgcaggcccagtgagcccggcaaatcgagtgacacaacgaacgtcatagaatgcagtgacaaaccttctgatatatatatcaacagcccatcgagagactgcctgtatatgtactaattatgtactaatatctaaagcatacatcaaatttatactcagtacaaggtgatatgcttctgtttgactccctgggaattagagaccggaaattatcaggatccagctataagctgtcaatctaacctcatgaacagtctcatacttgtccgacggaacaaaaccttacgttgcaatggtttcaggctagtgctcccactgggtatgatcagccctcagggctcagagcttctcactctttgtcaatctagtaatagaaaacaatcaaaacaaaccatcccatatggcatcctcgattttaggaacttgctacctctagtcgttctccaacatccttgaagggtaacatatatatgtggtacagtacagaatgacgaagtataaagtcaagttgatggcctgaaatctactcggatcatctgatttccgacctccgtgcgatgcgggatgatcgacgtcacagtgaagcgcagtgagtatcgcgtcaatctgacttcaaaataagaaaatttatattggatactgtgggattgactttaatacagctcgacttctcggatatccgaacttattctggattttgcgcccaaggtgattcatataaatatttgaatgtggggaaatacagagtgccaatcatctatcgcaaatcagctcgccagaattcatttagcttcaatatcgtgcggggtggtatgatcagctcagatcaaatcgacgtcattgctacattcccacgtatctcacagagcctcgaccttccccagtctttcatctccgctttcaatactgaaccaacattttgcaaacgccatggctgaagcagaaacacaaccacgtcgactgtcggcggataaccaatcagtttcgaaagccgatgtttctatgaaggaacgcttcttccgctacttccagcatgagatcaccggtatgttcccgttggtattcagacgctacatcattatcaagccacacaatttcaaaagacccttgctaatgacattcttctagatttgcagcaggagatggatcggcttgcagatacgtctctcgtgggtggtgaacgtgccgatgcaacagaccactgccttgccgggatcgtacggttatccaatgaggtcaaggatgcagcgagctatatccccacttatgatcagagggtgtacgcagaggtaaacgcgactcacaatatacccaatagagcagagctgacataattacaggcaatcaaggctttgcaggatcgattgagcgaaatacgtgcaacattcgagccccgatccaagtttagcttcaagaacaagaaaaacacctctgctgtatctttgtctgatgctgccgtgctggcagttgaaggacggcttagcatccctgggtaccactctccaggtgcctcgtctattgactcatccgccaaccacacacccaactatccttccaccccactgaacgagccagacaagcagcaacaagagcgaccggagcttgcgcccacttcattcccaggtggcccggtcggggactttagcacaaattcccagtcggagaatcctccccctggtgcgtttgcggccaccggcgtatcctctgtgtcggtcgatgaccattatggccttcatattatgcttccggcctctgggtcgtcacccacagtcccggtatcaatcacctccttgaatcgctgcatcgtggatatgtccattcccaccgccaacggaaagccatacgccagtctgactgccaaagggatcaaagaaagcttattaatctgtggtcaagtcaatggccccgcacacatcaccggtgttaagaatagcgtgatcgtgatctcatgtcgccagttccgcatgcacgactgcagcgacgttgatgtctatctcagctgttctagcaaccccatcatcgaggactgttccaatattcggtttggtcggatcccgaaggcctatgtcagtgttctcctcgtcgctatatcttttgggtttaacttacattcttctatctaggccttgaggcatgaccgtcccgatcacgaagaccgttggagccaggtcgaagatttcaaatggattaagcaggagcctagtccaaactggaggctgctcgaccccaacgatgccgttcctgaagaggtctgggcagagattgttcccggcgggccgggatggtctcttgaggacatcttgcatgccattaatgtagtcccaaactagttttatccgcttggtcgttcgatgtcttacttcctgctttaatggacatgttcctgcaggacgcatcctcgatatcaattgtcatcatgcgctcacgagattgattacgccattcctacttcgaataatttcaagttctactcttttatttttgatgccaccattatcaattacgattttttgcaatgtttgaatttgtggaaggattcaaggttattgcgttacttcagcatgtacttgtagactcagctatatatctgtaactacacacagaaatatacgagattgacgaaggagcatatactgacttgagtgtaatgtacaatctctcatttagtgggagaggaatatatattttaggcgcctatgcagcctagtagtctgacagtatgaaaacgtttttcatgctaacattacgctagccttttggatgtcgtttatagcccggaggatgaagataattggcaaattacagaataagacataaaacgcctttccaggtttaaatgtgatcaataacattacttttgagaggtagactaggtcactgtttgtgatctgcaaaagttcaaggattacgcgttccaagttgtgggcactttggggtaattcttcgcgtggtagcccaggtcttcatagacggttgcatctcctaggattcaggtcagtctcaggatcaacagaaaattaacgtcgcaacataccttggagggaatcaacccgatgctcgtcttcgtctgccattttctccaattcctgaccaggctcttcctccttaggctgtttatcacccatagaagacgcagccttgccaaggtcattctgcgccgagccgatcatgaggaattgagaataaggatagtccaggaactctggctgcagaggcacccatcggagatctccgaatttctcaagtaccctaacgagaacaatgttaatatgagaatatttaaatcactccatggaagacagcttacgatggagggaattctggattctttggtaattgaccaactggtggaccaggaaacttgggactcttcgactggacgatccaacttccgcgttcttgcaggccaaagtcctcctggacatcacccaactcggccggaatggtcaggatataggcgagatgggatgcccgaggtgcggaggtgatcgcgtagacaccctccgcatagggtctggctgcctcggtatgacgttcacctcgggtggaagtctggtaggttttaccagcgatgaaattatcgtggagagcttgcatggattgtccagccttctccacaaatcccatttctcgttctctggaagaggtcggaaacttctttttcgggagtatcatcaaccgacacgaggcgtctttttcgacggagccttggccgttgtcgaattccgctccaagggcggttggacggaggacaaagaagctccgcgcgacatcgccgaaactttcaggctcgtctacatcgacgcgtgggcggaagaaaaagtagatgaagcctttttcgagaatgttggagggtactaagttttccctctcctcggacttatgaagacctccctcaattccttgcggtttctccggatggctttcgactggtttcaccgtcgatgcttgtccttcgggtggttcttctgtcttgacaggtgcttcttctgtcttgacaggtgcttcctctgtcttgacaggtgcttcctctgtcttctgcactaaacggtctaccgatgtacccggtacttcctcttttttcaattcgtctggctttatatcctccgttttctcctttttcggctgtggagcttcatcgcctgaagctctccgctttgttcccttggaagtcttgccggtcggctcggcggaagttgaaatggcctccttggccttctgagcagcgtggcgtgaggatgttcgtgtagccatgatgaatggtggattttgtggacgatggtgaagatcaaatctgatgaagcaatgggatttagcccctagggctgtaatgagatacagatgacgtcatgtcgtacgttgcaagtccgcatccgtgactttgctagaaatgaccgctcagaatgccattataatagaagtttcagtcgatatccatctcatcggccatgggccagttgttcatggggtcgttgccgttcaagtcgatcgatgctgtctccgaaccggagctttcattctcgttggcttcccggaaagcgccaaatgagtctatgtcttgagcatgccactttggaatttcgctaaacctttgccttttgggacgatgctcatgaacctcggtctgggtctcggccgacgcatgtccttgtgcgaaaaacgggtagcattgttgtgtagcgagagtgttgtgggctggctttctcttctgtcctctctttcgcgccgaaggaattgtattgctattcgatccatcgggttcgtagcccatgtcattcaggtagtctgtcaagtcgcgctgccatcgttcgaaccgatccgggaggcatagtcgatctaccctgggtaggctagtttctaactcatcatcaggctcttcgatatcgtagggcttgatgactcgaatttcgtcattgtcctcgagcggatccatgtcatgcgcaggcgttgagggtcctgagtcgtccatactctgctccctttccttgggctgatggtctgctgcagcatcagaagtaaggtcggcgaagtattcaatgggctccttaaacttgtcaggactcgtatcattcattggaaggtcttccattatctgatatcaagtcttgaacccaaacggcgttgacatggcaatccgaggtagacggtcaagttgcaaaaaccataactgagctcccaaggcaggaatgatggagtatgtgactggagaaatgtatgctattaaaaaataaagtacaatgaagagatcaggaaaatcgcacgagaatggaacgcgcaagaaagccatggtcgctataacatcatggccttccagatgcttctaacgtgggggtgataaataaccgcatatatgtccactcgacgttgaactttggatgccggttcgaaaaaagagaaaccataataggaatgcaatatactatgagaatatatcacgattccacttcgaccctgatctaaaaataatcaagtctctttggacagcgtaaagatcgagaccagctcccctgacctctcaccgcccggcagcatgattggccgatgtcattcgcttccacaatagagtccacgtttagttaactgctacactaacacaagcatcaagtgtttacctttcgctcttttctttctttcaggtggatgcggtggtcgcctctgccttatattgctctctagtgtgcggagcttgctactttacagtgcggctccggccaaatcttcaagatgcagtcctccccaaacatgctcaccaaggtacaccccctcgggcatcttaatgcgccatcgaacaatgggactcaattgaagatgctaatcattctctcaattgtttagtttgagtccaaatcctccagagctaaaggaatcgcgttccatcccaaacggtcagtcaatcccgcggagggacacctaacacctcaaagtgctcaatctgaccacaaaacagaccatggatcctcgtctctcttcactcatccacaattcaactgtgggactaccgcatgggaactcttatcgaccgattcgaagaacacgatggcccggttcgcggcgttgacttccacccaacccagcccctgtttgtatcgggaggtgacgactacaagatcaaggtctggaactaccagactcggaggtgcttgttcacattgaatggccacttggattatgtgcgaacagttttcttccaccccgagctgccctggattctgtctgcgtccgacgaccagaccatccgaatctggaactggcaaaatcggtcactcagtaagatgcattggagctacctgcaataacatcgactaacacgtctactctttttagtctgtacgatgaccggtcacaaccattatgttatgtgcgctcagttccaccccaccgaggatctcattgcctcggcctcgttggatcagtcagttcgcatttgggatatctccggcctgcggaagaagcactcggccccaacctcggtttccttcgaagaccaaatggcaagagccaacccaaaccaagccgatatgttcggaaacaccgatgcaatcgttaagtttgtgctggaaggtcatgaccgtggtgttaactgggtctcgttccaccccacactacccttgctcgtgtcagccggtgacgaccggttggttaagctctggcgcatgagtgatactaaggcatgggaagtcgatacttgccgcggccatttccagaatgcctccgctgctctgttccacccgcaccaagacctcatcctttccgtcggcgaagataagacgattcgcgcatgggatctcaacaagcgtacatccgttcagtcctttaagcgcgaccttgatcgattctgggttatcgctgcccaccccgagatgaacctgtttgccgcgggtcatgacactggtgttatggtcttcaagctcgagcgagagcgccctgcgtctgctatctaccagaaccagctgttttacatcacaaaggataagcacgtcaagtcatatgacttcagcaagaacgtcgagtcgccgccgttgctttcgctgcgcaagctgggttccccatgggtccccccacgtaccctctcttacaaccccgccgagcgtgctattttggttaccacgcccgccgataatggaacttatgaactgattcatctccccagagatggtactggggctgttgagcctacagatgttaaacgtggacaggctacttcggcagtcttcgtcgcccgcaaccgctttgccgtcttcagcccctcgacccaacaggtcgatatcaaggatcttagcaactccacaacgaagacaatcaagcccccagcgggcacgaccgacatctactttggtggtaccggatgcctgctcttcatcacccctacacatgttactcttttcgacattcaacaaaagaagcagcttgcagagcttgctgtcagcggggtgaagtatgtggtgtggtctaacgatggattgtactgcgctttgctcagtaaacacaacgtcactatcgtgaccaagacactcgagcaggttagcaccttgcacgagactattcgcatcaaaagtgctacctgggatgacgccggtgtcctgctttactccacccttaaccatgtgaagtactcccttctcaacggtgacaacggtatcatccgcactcttgaccagactgtatacctcgtgcgcgtcaagggacgcaatgtctatgctcttgaccgcaacgcccagccacgcatcttggagattgacccgactgagtatcgtttcaagcttgcccttgtgaagcgaaattacgacgaaatgcttcagattatcaagacctcgagtttggttggccagagcatcatctcttacctgcagaagaagggttacccggagattgctctacaattcgttcaagaccctcagactcgctttgaccttgcccttgaatgtggtaatctcgaggtcgccaatgaaatggcacgggaactcgaccgtcccaacttctggaccagacttggagctgaggcattggctcatggtaaccatcagatcgtcgaaatgacttaccaaaagcagcgtagcttcgacaagctctctttcctctacctctctaccggtgaccaggagaagctttctcgtatggccaagatcgccgaacaccgtggcgacttcacctctcgtttccaaaacgccatctaccgtggcgacgttgaggaccgcattcagatgttcaaggaagtggacttgtgtatgtacaaccctagtgccgattgtttctttcatactaattctcgcagaccctctcgcctatcttactgccaagtcaaatggtctggttgaagaggccgagtccattttggaggctgttggtctcaccgaagatcagattgtcctacctacactcgatcaacctctgaaggttcctcaccctattgtacccactttcaattccaattggcccgttaaggctgccggtcactcgtccttcgagaaggctcttcttggagaagttggtgttgctgatgaggaggctggcgctgttggattcgagattgaggaagaggagcaagaagctgatgtcgctcgggaaaccctcgatgatgacgaagaggcagtttccggatgggatatgggtgatgatgttattgttgaggaagaaatcgactttgtcaatgtggaaagcgccgaagctggcgccggcagttctgaggctgatttgtgggctcgtaactccccgctggctgctgatcacgtcgccgctggctcttttgacactgcgatgcagctcttgaaccgtcaagttggtgccgttcagttcgctcctctcaagcctcgcttcctcgaagtttacaaggcgaccaagacctacctcccggcgactgctggtctaccgcctttgatcaactacgtgcgccggaccatcgacgagactgactcccggaagatgcttcccatcattccccgagacctagagaccgttgccagtgttgacttgcaagagggttatgccgctatgcggtccaaccgattggaggagggcgtggcaacattcaaacgtattcttcacactgttctcgttaacaccgtgtcatccgaagccgatgtggatgaagcgaagaagatcattgccactgctcgggaatacattctcgctatgtcgatcgagctcgagcgccgtactctctctaccaactcccctgaggatctcaagcgtagccttgaattgtctgcctacttcacaattcccaagctcgaggtcgctcaccgacaactagcgttgatggctgccatgaagttggcctttgccaacaagaactacggctcagccttgagctttgccaaccggatgctggctaatggaggctccgctaaacttttggaacaggtaagaattcttaaagttcaattttccacttataatataccaatgctaattatgaaaaacaggccaagaagatcaaagctcaatgcgaacgcaatcctcaagaccagatcgacattgacttcgaccccttcgccgagttcgatatctgcgctgcgtcctttacccctatctatagcggctctcccagtgtctcagatcctttcaccggcgccaaataccatccccaatacaagggaagtgtcgaccggatatcagaggttacggagattggtgccccggccagcggcctacgcctgttcgtccccagtcagttttaattgccgcatgacgaagcataacggttttttgccttttttctcttcttgaaatgaagttacaaaatgggtacattttcatctgcacgaggagaagttgtgtttggcggcgctattcattttttttggctgggagaaagacaaaccttcctgcacacagtaccagtccccttgtctagatgtctttttgtatccaagattataattgcttagcgatctagtttgtatgcgaacatgttttgtccaaaagctctatctcctaggtattgcccaaaggtcttgtcttcgcctggtattcatgtattacccgcttagtagtgataaaagcaatccgtctttatttgccaaatatgcatatctaatgtacaagggagatctaaaccgaagagtagagagaagaccactccaacaaaaacaccataaacgtacagttcaattacaccgaccatctttccacccagttcgccacctctcttcccacaatcgacaatcaaactccttcttcccaagctttcgattgacctcattatgcgcctcgcacatccaccacccaaactccttccggctctccagtctcggctgattccgcccactcggatgcgccatccatctctggaaatcatccgcgcacacccagcaagggtacagctttgaaaagaacttcaagaacccgcccatattagcctggtgttccgtatctgccttttcggggtatgtggctgccatcgagtgcaatagtgtccatgtggagcgacctagctcttcgacgtctggcgggcagtctgagggagtttcgctcggggagggggttgcagcggcggccagagctggcgttgaggtcgtcattttgcctgtgttcgaattgggggatgaggtagcgttggagtttgcattcttgagttcggcttgcttggtcaatgctcgccatgaggcgacggaggtgcaggtgcggcagctgtaaggtgggtatattagcgccgatctcggttacggctagtcgtagatacgtacggctttccatctttgtccaggactacacccttgggcaatggcgcggctttcgggtcatcgtctccggttggcttggaggagcttgcggagttcgcgggggtttgctggttgaatatggaccctgtgcctttatattgactactgacttccggtggagccgatgccatttttcacctgtgattatttgaatccctcgacagattggtgatttggagtggtgaaagtgattcgaggttgatttctaatggattgcggagaaacaccggaggcgagaaagaggtaatagtgacggatatttggcgcaacagtcagtaaagagaacttggaataagctagcaagatccttagaatcaatgagctttgaatatgtagatccagaaactgagcccttgagcaagagtcgcaaatgacatacaagtctaatgtcatgccgatcaatctcgatccggctttgtcatccattcacacgcgctcgctcaacccagacgcgctcaagttcgcagtttgattgagataaataaatatctttcttctattactctgctctttggtccttatttcctcacatatcgtccgaggaactggacgattcatacgaactcgctcctacaccattaacctcctttcgatcgccatagagtgacataaacatgccgccgaagtatacgttgtccgactctgaagctgagggtgaggcacccagcactccctctcatcagattctcgagaagagccttcgtgaccaagtggctgcaatcttcaaggcgggaaatttggaggaattgaccgtgaagcgcgtgcgacttgctgcggaaaattcactaggtctcacagcggggtacttcaagactacaggtgactggaaagcgcggagtgaagatataatcaaggacgaggtggtgagtctttgtttgcatttgcagtgcttctttagcttgcgcagcttcagcggaaagacactgattgcgatgcttttacagggaatacaagatcaggcaatattagatccacaatcacaaacaccttctccctcgaaggccaagcctactgcccttgcgaaacgagcaaaatccgagaccgcaacaaagcccaggaagcgccagaagactaagacgccggtatccgatgaggaagatgagctaccggccccgccatccgagactcatgaggtcacaaagcccaagaatcgatcgaaggcacctataaaaaaggcacccgggaagaaggtctctgtacaaaaacacaaggacatgtcagacggttctgacttccctggtgatgagagtgatgatgtcgcaaagccgaataaacgatcgagcacgccagtgacgaagtcccctttgaagaagtcgccagcaaagaaggcctccgtaccaaaactcaccgaggatgtatcagatgttcccgacgatgctttgaatgccacaaaaatgaccaaagataccaaagatgattcggaaagcgagatgtcggtggtgcttgacgaagagccccagcctaaggccccacgcaagcgacaaagaagtgccggagaaactgcaaccaagacgaagaagaaagcgaccaaagccaccaaagccaaggaggaggatattagcccggaccaggctgaaatcaaacgactacaaggatggctcgtcaaatgcgggatccgtaagctttggggtaaagagctggcgccatatgacacccccaacgccaaaatcaagcatctcaaggggatgcttcaggatgctggaatgactggccggccatctcaagagaaggcaaaccagatccgcgaagaacgggagctgaaagcggatttagagcagatccagcaaggcgcaaaacaatggggtgccgtgagtgacgaggataatgatgaggaggcgaagcctcggcgtaggctgggtcggggacgacagtcgcttgcgttcttagagagtgagggcgaagagactgattgatggatagcatagggtccgtaatgaatgaatttgtcggactggttgagctgtgatgaaatcggatgatgcgttttatcactatgtatttcatacttcatagttcataatgtccaaaaatatagcaataggagtctccctcatcacccgactttcggtctactcatgcgctgcgcagtcaggctgaagatggcaacagaagagataaagaggacgagattgtagaactaaacttgttagcatgatcaaatcgactcgaggggtccattgacatactgcttttcgcgagtactcgttctcctccgcctcggttctagcctcgacaaagaggcgtcgcaagttagggaggttagcctgcagaagtgttagtcttggtggttggataatttgactgatgtagaataaataccatttacaccgtgatggtctggactaatggcaaaataaatgaaagagagagttgatggccatagagcgggagagtccagaagccaccatttgtggacaactttgatcgtccgaaacaccctttctctccttcgcccccattcctcctcgaaatctacccaccccggattgttcacgcacctctctgtgtttgcggacaaagtgacgaacaatctcgacagattccattccctgacctcgcgcgaccgtgaagctcccaatcccccgcagtcgccaaacgctactcgattcccaccccaatcccatatctctaggcggaggcacgacctagtcgttgctgaagcttatacatcctcgccatggcgatgaacaagatccgcggcgcctttgcggtgcctcggaaaggagagacatttgaattgcgagctggacttgtgtatgcggccccctccaccatgcgctggccaccttgccatggcgaatgatggatgatattaactattatgacagttcccagtatgcgtatgaacggtatgtatggcagtgaatcctcagtctgcccctggtagtatatgacggagacgtggtttggctgacaatgcaacaggaaggaatccattcaaaagacaatcatggccatgaccctaggaaaggatgtttcggccctgttcccggatgttctcaaaaacattgctacgtccgatcttgagcagaagaaattggtctacctctatctcatgtgggtaccaccgtacaactcaaggtggctacgtatgctgatcggtcgaatctcactttcaggaactacgccaaatcgcaccctgatctatgtattctcgccgtgaataccttcgtgcaagattcggaagaccccaacccactgattcgtgcgctagcaatccggacaatgggttgtattcgggtggagaagatggtggactacatggaagaaccgctgcgcaagaccctccgagacgagtcgccatatgttcgcaagaccgctgcgatctgtgttgccaagcttttcgatctgaacccgacaatggccatcgagaacgggttcttggagatgcttcaggagatgattggagaccccaaccccatggtcgtcgccaattcagtgaccgcacttcaggagattcagcacacagcacccgagacacatgctctacagattactggtaacactctgcggaagatgctgatggctttgaacgagtgtacggaatgggggcgcgtgactattctctcaactttggccgagtataagactaccgacgtgaaagagtcggagcacatttgtgaacgagttgctcctcagttccaacatgttaatgccggtgtggttcttgcggcagtcaaggctgtgtttttacatatgaagaacgtcaaccctgacttgtcgaagacctacctaaagaagatggctccgccattgggtatgctcccacgctgctctcattgcacttattttttactaattctgtatagttacattggtttcatcagcccccgaggtgcaatacgttgcattaagaaatatcgaccttatcttgcaaaaggagcctgacattctcaacaaagagctccgtgttttcttctgcaaatacaatgacccccaatatgtcaagttccagaaacttgagattatggtacgcatagcgaacgatcgcaatgtggaccagctccttgctgaattgaaggaatatgcccttgaagtcgatatggactttgtccgtcgagctgtgagggcaatcggccaggttgccatcaagattgagagcgccagcgagcggtgcgtcaacacgttgttggatctcattaacaccaaggtgaactacgtcgttcaggaagcgattgttgtcatcaaggacatcttccggaaataccctggctacgaaggcatcatcccgactttatgccagtgcattgatgagttggatgagcccaatgctagagcagcactcatctggattgttggagagtacgccgagaagattagcaacgcgggtgatatcttgagtggctttgtagatggtttcaacgaagaattctcttcggtttgtttttcctcctggtatatgctaccacctcgactaacctatctagacacaattgcaaatcctcacagctgtggtcaaactcttcctcaagcggcccgagaaggcacagggcctggtacagcgggtactccaggctgcgacatccgagaacgataatccagatgtccgtgaccgagcgtatatctactggcgtcttctgtccaacaccagcgatccaaacgcgacaaagaacatcgtgctctcggacaagccccctatcgtcaccacgatacattcactgccaccggcactcctcgaccaactcctttccgaactgtctactctctcttccgtctatcacaagccccccgagcagtttgtcggccacggccgatttggcgctgacgccgtcatgcgcgctgctatcgagtacgtattcaattccctgtttttgtcgaatatgtcgctaaccacttctcagggaacaaatccaaaacgcgcgcgagaacccattggccgcggctgctgccgctgccgctggcggcaccgcaggccccgcacagtcgcaaaacaacgtcgagaacttgctggacatcgatttcgacggtggtgcccctgcctccgcacaaaccgagccttctggcggcctgtccggcctggagggtctggctggtacccccgtacgtgtagcgtcccctacagctggtaccccgacagcccaaacaagcaacaacctggatgatctcttgggcgtgtttggagactctggtgctgctcaaccctcatcgagcggtgccaacagcagtgatatcatgaacggattctctggtcttgatctctctggtaatgcgggtccttcttcaaacaaccagactaagaaatccaacgacgacatcttgtcactcttctagagcaatggcagtgatggtatagccaagtgtgtttagcccacctactggttgatgttatttcgggtgttttcgcaagcgagcatctgaattgaacgagatagattgttttcttttagttgtttaattttgcttgcatctttaccggacttcaaaaggcctgtacatttctgccccgaatatcaatttctttatgagtttttggcaaagctgccctcatagaatagcatttaccgaccatcccttgtagtggagagataggccagcgagatgcaaatagcctcccgctttttctcggccgatgcaagccacaactccaccgcgtgcgaaaaataggaagaaaacctcatccctgcgctttgaccccacaaatctctgacttctatgcatgaagtatatcgtccaatgtattacagcagattctgtctatgcaggagatatgtactatgcagatgctgctatgctagcccaacttatctcccctactccacctagatagacatcacacacgttatgggccactgggccagtatgggcccctcaaattgcgaattcacacaaaacggatccatcggataagaacgcggcttaccaattagtgattataccgaggtttttccagtgtcaaacgccgagttgggatcggggttcggacctgtcccgcgtccaagcgtataaatagggcaaagctcccggaaaagtggtgcacggtgaacacttccaatccgacaacatggcggaaacagactacaaattcgagggctggatgggtctcgaccctagtgccggcgagggcaagatggtctggcaagaattcgagccaaaacaatgggaggagaccgatgttgatatcaaagtgtctcactgcggcatctgtggctctgatttgcacactcttcggagtggctgggtatgttttatgttttccgtacagacgcagcgttgtgcaatatctgtataaaaattttaaaaaaaccagcaaactaacattccacagagacccactgcctacccctgctgcgtaggccacgaaattgtcggcacggccgtgcgcgtgggtagcaaggtatccgacatccagctcggcgaccgcgtcggtgtcggtgcgcagagcgagtcctgcctcggccgtctcggcgactgcgaggagtgcgcatcaggcctggagaactactgctgcaagaaagtcgtcggcacgtacaacagcgtccactacgacggcagcaagtcgtacggtgggtatgccaggtaccaccgtgtgcctggccacttcgccatcaagatacccgatgccatctcgtcggctgatgctgcgcccatgctgtgcgggggcgccaccctctacagcccgctgaagcacaacaactgtggtcctggcaagcgcgtgggcatcattggtgttggaggactgggtcactttggcttgctgtttgccaaggctatgggggctgatcaggttgttgctatctcccggaagttggctaagaaggaggattcgctgaagatgggcgcggatctttatattgcgactgatgatgagccggactgggctacgactcatgctcggtctttggatttgattgtttcgactgtctcgtctactaagatgccgttcaacgactacctgggtctgctgaagactgctgggtcttttgtgcaggttggtcttcctgaggatggcggattgttcgctcctgttcggagtttgatgcgtcgcctcaagctgcagagttccctcgttggtagccccaacgagattcgggagatgtttgagcttgttgctgaaaagggaatccgcccgtgggtggaggtcatcccaatgaaggatgcgaataaggcgattgtggatatggatgacggaaaggcccgctacagatacgtgcttgccaacgagtaaaagcttataattagatagctagaatagacgagagatgtgcccacgaatgaagatcgaagtgttgaaagtatagccgtctagtgtatctgtaaagattggtctacgttagggccaatcaaaccacgcacgtgagcgccgttctcggaggcgctattccattttgggaactcagatttcccccgcggtggaatgaatcattccgcctcttcttctctacttcggcttcaaagattttctgtttgagtcaattgacggtcgcatcatgtctcctacactatcacaacagtatttaagtacccgcggtgctgagtacggggtgagttggaaaataacagttccaagtttcattgcaaacatgttactcaccaatctatctagagaacctttgaagatgttgttcttcaaggcctggcctcggacggtggtcttttcatccctgaggaaatccctgctcttccccaatcatgggagaccgaatggcgcgatctgagctttgaggatttggcgctcgaaatcatgtcgctctatatctctacggacgagattccccgagaagatctcaagagcatcatctataagtcctactcgactttccgacaccccgagcgcactccttccgtcctccttgaaaagaacctctacttgctcgagctattccacggcccgacctttgccttcaaggatgttgcgctaagtttcctcggaaacctgttcgagtatttccttgttcgaaagaatgctggaaagactggcaaggacagacaccacctcaccgttgtcggtgctactagcggcgacactggttcggctgctatctatggtctccgcggcaagaaagacgtctctgtcttcattctcttccccgatggcggccgagtctctcctattcaagagaagcaaatgacaactatcttggatcctaatgtccacaccctcaccgtggcgggctccttcgaccattgccaggatatcgtcaaggcgctcttcgccgatgcggaccttaactccacccacaacatcgccgcggtcaacagcattaacatggccagaatcctggcccagatcacctacttcttctactcctacttctccctcaccaaaaccgcctcgttcaccaaggaatccaacgtgcgcgtggtcgtcccgtccggcaacttcggcgacatccttgccggctggttcgctaagcagatgggtctccccatcgagaaactggtgattgccaccaacgagaatgacattctcgatcgcttcttccgcagcgacggccactacacaaagaaggccctcgacgcgaccaccgaccacggcgtgaaggaaacctacagtccagccatggacatcctcgtcagcagtaacttcgagcgcctcctctggttcctgtcatacaaaaccgccagcggcagcgaagccgagcgccgcaagatcgcctgcgaaagtgtcagtgggtggctgaacgagctcaagaccaacggcggcttccaagtccccagcgccgtcctcgaagccgccaaggtcgatttcgagagtgagcgcgtcagcaacgacgagaccatcgctatgatccgtgatatctacaagacttccttccctaagggtcttggtcccggctccgccaagagctccaagaccggtgggtacatccttgacccccacactgctgttggtgttgctgctacgcgccgctcgttggcgcgcaaccctgaggatatccatatctctctgtccactgcccacccggctaaatttgccagcgctgtggaccttgctctgcgttccgaggatggttacaacttcacggagatcttgccccaggagttcattggtttggagcagcgtgagagtcgggttaccgctgtcggcgagagtgctggatggcagggcgtcaaggagattgtcaaggcggagcttgaacaggagttgcaggggttgcgatagatccggacttggcaagagaataacgtgttatgaaattcaccgagttggtgagattcaacgggaggagcatgtgtatgctaaaaaaatcttgtgttgtagtatagacatgttggtaacgttttcactgttttcctcccttctattaaaatatatttccagtttttttttacacctataatctgagggcttgttgaatcgatactgaaaatgactgctcagattggacaagtatctgttatcctaagtattagtactattcatgctggataatgcctgaagagatgaagctattcagagatcacctgatctgtcaatatcggcgttattcatcaagtgggatgaccggtggaacttcattggtgactttcctcgccccaccggagctgtcattaccttactcttttcctttcaccttcacttttgtcacttcacttgtgaaatcgaaaggttggcaaaattctgcacaatgccacctcctgccaatattatcccctggttcaaatgtgactatccagattgcaacgctaaatatcggcgtaaagaacacctgaatcgacatcgtaatcatcatgatacggaaatcaatctcgcctgtccttattgtgagagcgtcctaaccaggaagtgagtaatttcttcgatcccgtgggaagactcaacttagagagtaatcagtgacctgttgcgacgccatgtccggacttaccatccgcaaagagaactgcctccgtctcgaaaatttagcgcatgtactgcatgtcatgcacggaaagtccgttgtgaaggtgtattgccatgcaatgcctgtcagcatcgcggcgtcctttgtgtgtctagtggggatgaaaccgtaagcgaacaacaattttcgatcgatgatctctgccctatgccgcctgtttccacgattgatgattccgtttctgacgctccccggtggattgctcatgactatattgatatttactttaatactttccatccaagatggccgtttcttcatcgaagtacatttgacttcgccaaggaaccttgtgtacttgttcaatccgttgtcgcaatcggactttgggtgaaagggactcaggaggcacgagacgcatcgatacgtctacataatcgactatgttctgcattttacgctcaaatggtgagaagaagaagcatgataaaagtaactgcatatagaattgtgtgttgatatcatctttttgctctaggaccaatggtgcatctccaactccagtccacgccaacacataaatacatcgtggcctataacatcatttcaaagtgtgctcttgaatatcattctttctcttttcattgcaagggagaatgctagtacagatctgagcatgcaatgccgattaccagacgacaaatacgacctcttggctgcgcttgttcaaagctgtcgaaggtcggggatcttctactaccctaacatgcttctgcaacacgatgccgatgcaccactcgcgcttgtatatgtgagcgttgaagagatcaagagatttggactagccctctataaggtgtgccgattgtccactcccgcttcctttgacttgagcggagaatgttccaatagtggcacaaccaatcttttgaccctggccgacttgtccttttgcatgccagacagtgatgagctgtggaatgctccattgggcggtgagtccgaggtgttaaacaagtctgattcatccgcagtcggacgggataatggagatgcgaaaaactggatatctcaagcatctgctcttctacatgacgcacgagttggctttgattggatatagcagaaactatcttacaagatgcggcttttaagccacagatcacaggccataagggcaacaatcgaacatattccctccggttgtccactcccacttcctttgatttgagcggagaattttccaatggtggcagaaacgatcttttgaccctggccgacttgtccttttgcatgcccgacagtgatgagctgtggaacgctccattgggcggggaatccgaggtgttaaacaagtccgattcatctgcggtcggacgggataatggagatgcgaaaaactggatatctcaagcatctgctcttctacacgacgcacgagttggctttgattggatataggagaaaccgtcatagaagatgcggctatttcgccacatatcaaaatgcagcctataaatgcatcgaacatattcccttactattttcttgacaaatacctttgtaatatttttttgtcaataaacgtacattggatctgcaccttcgccaccccgaggtccacagtcaccgatccttgaccgggtgggatggccgtaaagtgatcggcctccaggtgggatggccgacccgtttccccgcaaaaccatagggtttctaagcaaagagtaacgaagtacatataaaccggctcttctttttaatatcgagtgttcctactgcaacataatccaatcctccattttctaaaaacctctttatctacaatggcttctaccgctcaatccttccgcgagatcgtcggaattccccgctcctcagcttccccgaaggactcaaccctcatcattatcgacgcccagaacgaatacgccacaggcgctctcaagaccaaaaacgttacagaaacccgcaaatccatttccaaactactggaacgttaccgtcaagccggtaacggcaaaaacatcgtgcacgtcgtccacgaggtgcccgaaggcgcacccgtcttcacgccaaacactcccttggcacaagagtttgaggaactcacccctaaagcgggcgagaaagtggttaccaagaactttcctagctcgttcgcaaagaccgatctgcatgactatctgcaaggtctaggcgatgtaggaaagaaagtcgtgttggttggctatatggcgcatgtctgtgtctctaccactgcccgagcggctgctgagcttggatatgatgtgctggtcgtgagggatgcagttggtgacagggatatccctggtgtaaaggccgaggatctggtgtctgttgtgttgagtgagctggcggatggtttcgggactgtcgtctccgaggaagatattcgtgcataggcaactgatgcaatctgaaactgcgaggactattggatcgtattcaaaatcttcggactgtatgaaattctttcctatttccgggcctctaatatacgcacattgtgccgtgttctgataacagattcttagtaggggaatgtgatcatcacgtttcgggtaaaggaaatagtgtaccggatactacgccaaggatatgccaagacacgccaagcacggacgggtttgcggggcaatcaacggcttctaagatgttcatgtcaatggatgccggtccataccttaattgtctcaattccctattgcctttcggataatttccgaagcccgttaagtcccactaccgcggaagaactgacagtcttggcaatggaaatacaacttatagatagtcgacatttgttgaacacggaggaaaaggttgagctggaacctgcagtacgcaataaccttggagctgcatgtctcagttcaaggctaaaatttgaattttttttttttttgccgacatgtggcaaggggtgtgaccctggaagcactggcgatgccgtcaaatgagagaaggaagtaagcgtgtggacccgagatccaacctcccttggcgctgttcctcgttgcttctcgagttcctttggccttggctgtgctggtttgatgcttgatcaatagaaaaatctggagttcttatgacttggtccagaaaacagagcgagggaaagaaatgttggcttccacgttggctttgatatttctgagtccggtttctcccatagtcttccccgtatgtagctcacctatgttcttttctcctctttctcttcaggtcaatcattccagatagcccaatgcattcgtattgatctcccagcttcctctccgagactgttcattttaagagtattccctcatgataggtttcaaggtagcgaacgaggaggatgacggtctaactgtatatggtagcgagtggtattggtttatgtaagagacttaatagtaatagtgatagttaattaagaggttatatctaaggaagggaacaaatgtgtggattattagtaagaatctggaacgataggatgataattggtgaagatatcattagctaccgatataagtttcggctcctttcaagtctaatgcggtcttcggaagcttactttacttaatttgaagatggaatatgatagagtcctactatatgcagttgcaactctggtaaccgatatgccgacccctaaaacccatggccacttccgaaagtcgagccgaatcccgacttatttgcctgaattgctatggatttacgggtttacgggtttgcaggttctggcgcagtctagactctgcacttatatggacgttgaaggtgggaagtcatgacatcattctccttctacgtcgttagtctattagacttgatttctttatcaaaacggctaaaatctgtaccgaggcagaggcgcaagttccactaaaagattgcaattgttgcgttctagaattttgatatcatcttttgaggacgataatctctcggtcatgccgagtgataggttccctctaccgagttccaaccttaatatacatattggaagtttggttgagcctcacaaggctggccagtgtcgtgggcttcggattctttttaccgccaattcttatttcacctgatgggtatcaagtttttcaggtgtaaaaatcaggccatgatagatagtcggaaccggcaaagcctcggagaaatcggaaatagtagatgtcaagcatacatgttccatctataaatcagtatgttccacctcaagttcgcctgtgtgcaattgttgaatcgtctctttttacagaattctgactacacctccaatatgtgtttttgcgggatgtgctcttgcaactctggttcgaaatcagtcgggtcacaatccgttgagaacctggtgtacgaaattgtcaaaccgagctttccttgcggtgagaagctcagcaatagaagatgcttccgcagagcttcaaagatccttctcatcggtgaggtgcctggttcagagttataagcaatccataacccaacgcaacaggatcctcggggtgtgggaaatcgaccgtgatcaaaaagctacggatgcggttcggtcgagacatttcttctcgcgaaaaagaggaaacccgtcttgttgtttacgaaaacatatacagtgctcttgcatgtgctattcgtgaactacaagcccagggccgtctcctggacaatgcggatgatggggtaaggcttcaatcttcaggattcatggcaatacactgacactaccaggtcattcaaacattctggagcaatcaggagttcggaatgacccaaagtcgatggaactgcgaattgctcctatcaatgcgggaattgtgtcatagagcaattgttctggccactgctcttcgattcatgaatccggagagctatctcagaatgtacgcagctgggtcatcttgcaaccaatttctcctcctggattccatcatggaccacggctaatgtatgacaggtttctttcttcctacagccacgttctccagcccgagtggaatcctaccgaaacagacgtaatacaatgctacgtcccaaccaagtcgttgagtggtgcatggatcagcaaagacctcatagcattggaggccaatactaaacatacgacgcaaaaagaattgtccaagattatgccattagttgacggtattgtgtgcgtcgcggatatctcaactctcgactaccgatatatggtagaccccgggaaagtgagtctaactgtgccactccccttcctttctaccccagttgctcaccaaatcaagtctcaattcaatgaatcgctgggccttctcgaggaagtcctaggcagccggggtccccagcggaagccgatccagctcttactgaacaaaaccgatatactgcgcaggaagctaaagcacctgggagtatccttgtattccgagggcggactcttgcaatacttccctggttcggctgaatccgttgccaagtgcttcaaggagcacttgggatattgcgacgagtattatctacgggagatttgtgctctggacgcaacatggatgaaccacattttcaaggtgtggcgcgaaatgatgttcaaatcaaagcttcttgctgcaggtgttatgtgagaatcgggaatggctattttatctgtatatacatgttgcatatccttctcatctgtctttagccaagtatcttagacttagatatcagttagacctcccacttctcatgattaatgaacaaccaactatttgagacatttatgcttgacagtaaccgaatttcaagtgatttcataagtcttgagccattaaatagccaacccaagtaagtctatgtggcaatactctctccagccacagatgtcatgacgtggtccacttttcaagtaaatcatagttaagttttatcatcttgaaacctaccttacttcttattttttttcgtaaagtctgaatctctatcgttgtccatctctacctaccatccctcgatctgcactgaatcggcatgcattttcacaacagagactcctcctttcactcgacagataccgcccagaattcgccggattcggcgtcctatcacgaaaatgataaacctccatcatcgccatctgtcgagctcgttccaggtcaaaagggtcgactagctggtgggaagtacctccaaccttccacctcccaccatgaacacttcacaacccttgatttcgactttcctttaactggcaccaaagcgatagtccaaggtggtaagcaatatatcttgattgactacacctttggagacaaagagaatccattcaattggagcccttggaagaaggcattagtctcaggcctcctttgtttgatgacccttttcatcggcctagcgactactgcctacagctctggtatcacccgaatgtgtgcagatctcggcgtctccttggagctcgggcaaatgggtctgttcaccttcaatatgacctgcgccttggcaccattgttcctagcacctttttgcgaacttgctgggcgacgcattgtctacgcgggtgcatacgtggggttctcgattatgtttattggccttgcactaggcaagaatatcgcaactattctcgtatgccgagcgctgctaggtctattcggttgtgtagggactattcttgtcggaggtacctttggcgacatgtaccaccccgaggatcgagctatccctatggcctcgttctcgtatgtcgcaattctcggtaccgttgctgctccaatctacgccggcttcatcgacgagacaattggctggcgttggattgaaggaatccaaggtctagcgaatgtccctcttatgctcatcatcgtattcttctttcctgagactaggggcagcatgatgctttctaaaagggccaagattctacgttcaaagacgggtgatcaacgctatgtcgctctgaacgacctcgaagcacctaatttgaagcgtatgctatacaactcttccgtgaaagcagtaaaaatgcttattacggaacctgttgttttcttcttcggcctttggattagctttgcttggttcttgacctttctcttcttatcggtgatccctataacctatgaagaaaagaaaggctggagcgagggcgttgccggcctcccatacatcgcgctctgcatcggcacgaccctcggcttcatgatgcatttcctccaaattcacaaatacaatacagtccataaagacaagaccgatgaagaaatgcgtccggaagccagactttacggtgtcatgtttggagccgtcgcgctcccaatcggcctgtttatctactccttcacacaatacgcatatgtacattggatcgggcctatgatcgggcttggtctgattacatttggaattttcttcatcttcgagtcgtgctatagcttcacgtcggattgctacggtgaaacttcctcttcggcaatcgctggacagggattcatgaggaatacgctcggcgccgtgtcgcctctatttgcttcccagttctttcataatgtgggcagccaatatgcaggcctgattctgtcgatcatagccgctttcttgactgcgatcccttatgtgttgtttgtttatggtccggcaattcgatcccgatctaagctggcgagtgtgcctcagcgtcggcctagctccggtctttgaagactatcagtgcggtggagaaggtccgatgccggatgtcaagaatatttgagtcacattttccatagggatctatattggactattggactattgacccactccgaggagaagagaatgtaacaaaaacagaacgatctacatgtgggcagagtgtataattagtgaataacggtatagttaagtggcagtaacgtggataatttaagatttacagaatctgaaacatttagataagaatttcagatatttgcattgtgggaattcgtattactttgactgagccatgtaaagctcactatgttgaacgcaaatgtatcagaattccaagcagaatacactgtacaggctgtcaggtgttagacttgtcattcttggactccaaaatccaggcctaccttcagggcctgatgcgtagatgcagccccaaaggtggcgtatgcggttgttgcctcgtcgaatgaataatctgcaacaaacaatcagatagaatgtcttcacggtcgaggtttaggacttacgatgcgtgactagcgagttgacgtccaacttgccctctttcacttgctgcagcaaggaggggattgagatcgcattgaccagcgacatgtggatacctaggacaaattagcacagaaaggaagcatcaatgaatacttgacgaacttatgtttcggtcccataatttttccaaatgtaaatccacctttttgccatggactcccatattcgcgatgcgcccgccaacagccaccagctcttggcacaattggaaggtagctgaaatgccaaccgcctcaatgacagagtcaaacccttcatttttggtcaagtccaggagctgtttctttgcgtctggagcaccagagttaatcgtataatgcgcacccaattcccgcgctttctctagacgcgtatcgtccaggtcaaccatgacaatcatctcggggttctttaggcgcgcagtaagaagagctgcaatccccaccggacccgcaccgacaatcaccaccgatcctgctgagtggacgtctgaactgagcacaccgcattcatagcctgtcggcaaggcatccgagaggcaaaccgcatcacgtgcgtctatagaggagtccaagcggtggagcgaccgagttgcgtgcggtacgcgtacgtactccgcctgggttccatcgagatggttgccaagaatccatcctccggattcgcagtgggcgggaatacctcgctgacagtaacggcacgacccacatgatgtcatgcaggagataaccactcggtcacctacttgcaatccttgcacggtggagcccaaggcctcaacaaccccaacgccttcgtgacccaagacaacgccagattctgcggtttggatgtcgcctttgatgatgtgcagatctgttccgcaaatggacgtatgcagcattcgcacaactgcgtcggtgggctcctgaatggttggcttgggtcgttctacgacttcaatcttgccattgttgcaaacaagacccttcatggtttcttggattaaagtgtaagaggtgtgggaaaattgtcggtgcgagttgaaggaaggaaaagaagtcgacggcgtgataggagaaatggaagggttgggtctttgggaatttatataccagctctggaggggtggagaacgtggtaatcgtcgaggatagaaagatatggcccttattgacgtcaggcagcctggcttggtggacctagaaaactaaaacaaggcattagtcgtgatagatatgcttatgcattgtgtgtgggactcgtacattgttcatgatgtggatgttggaaacagatcgcggtttcgggggcacctcggaaatatatcagccagatcagctgattgtagagagtttcgagtaatttcaatagcttcgggcggaggaaggtgattggttcagccgtaagaactagttaactagccggactcctgctcgtacgttattgagttatcctcgtacgtttgccgttagacggataaggaatgtcttggccggcctaacatatccgagaatatgcatctttgactttcgcatgattcaagcactgagtcatgacggagaacaataatactttctttgtgtattatcaattttgaatccatttggccggaaccggaagaaggtggcttcattggaatagttggcctctacagtatcaaatgagttatacagttgccgttaaactatatattgcgagtgacaatatcacaagttccaatcagccgtaaaataataccgcatatcatgatcataagacatactataagagaggcattaaagagtagcatcatgatatttgctaacctttccgttctcatcttccatctatacgcttgaaccaaattttcatgtcattcatagtgaactggacaaaagcgtcaagtgaataacagaatatcagtgcagctagagagaacgcctttgaaaattctataatcaacgaattcgaaaattcctacgattagggctaatgtgtggagtttcctcggaaatttcttaaaacaagataaatcgacttttcattcaatgcatatgcttctcaaacgaaatataatcttcaaaacatacaaagagcgaaataatccaagcaatagacactatattactattagtatacttaaaataagaccgataaagttcacaaaaatctcgaaatgaccaagcaaccgttcttccttaatccttcggccctgttaaaagcaaaaggagaaattccaagcggggcataggccaggcatccaaaaaaaaaaaaaataccgaaggtaccatgaggtctctgatccacaccacgaggaccagagaggtcaggaaccggaagggatccggatctcaataaagagatggatcgaccgtcgaggcttctcaactgatttacaggagagccatgagggcaacaacaccagcaaggaagccagcaacgggcttgacgctggaggcagcaccggtgaactcgccagcggagggagaggcgccgtgctgctcaggggtagagggcgcctccggggcggagggagtaggagagccggagggctgggcagcgggctgggacttgacagggacggcgggctgagtctcgccgggaacagcgggaacagcgggctgggtctgtccaggaacagcggggacagcgggctgggtctcgccgggaacagcagggacagcgggctgggtctcgccagggacaacggggacagcgggctgagtctcaccaggaacaacggggacagcaggctgggtctcgccggggacaacggggacagcgggctgagtctcaccgggaacaacgggggtagcgggctgggtctcgccgggaacagcagggacagcgggctgagtctcgccaggaacaacggggacagcaggctgggtctcgccggggacaacggggacagcgggctgagtctcaccgggaacaacgggggtagcgggctgggtctcgccgggaacagcagggacagcgggctgagtctcgccaggaacaacggggacagcaggctgggtctcgccggggacaacggggacagcgggctgagtctcaccgggaacaacgggggtagcgggctgggtctcgccgggaacagcagggacagcgggctgagtctcgccaggaacaacggggacagcaggctgggtctcgccggggacaacggggacagcgggctgagtctcaccgggaacaacgggggtagcgggctgggtctcgccgggaacagcagggacagcgggctgagtctcgccaggaacaacggggacagcaggctgggtctcgccggggacaacggggacagcgggctgagtctcaccgggaacaacgggggtagcgggctgggtctcgccgggaacagcagggacagcgggctgagtctcgccaggaacaacggggacagcaggctgggtctcgccggggacaacggggacagcgggctgagtctcaccgggaacaacgggggtagcgggctgggtctcgccgggaacagcagggacagcgggctgagtctcgccaggaacaacggggacagcaggctgggtctcgccggggacaacggggacagcgggctgagtctcaccgggaacaacgggggtagcgggctggggggacaatgggggtagcgggctgggtctcgccagggacaacagggacaacagggactgcgggctgggtctcgccggggacagcgggatgagtctcgccaggaacaacgggaacagcggggtgagtctctccagggacaacgggaaccacggtggtcggcacaacgggagcggtggggcctgcggtggggcctgcagtggcaggcacagtggagttgtagaaggtcaaaggcttctcatcgcacaaggtgcacacggtggtcttggtgatggtgatggtgcttgttccggtgacgggcacagtccaggtcttagagccagaggtgatggtagacgaggaagctggagatattgttaggatgtgtggttcaagtggtacgaatctggtagaggttataggacttactagggcaggtggtggtcacataagtgagggtcttggtggtgccaggcttcacagggaagtgaggcttggtggtctgctcgggcacagtagtggttccgttggcccaggtggtggtgctgtgctcgggcaccggggtggtcgaggtggtgcacggggtggtggtattgctgtacaccgggacggtggtgctatacaccggggtagtggtgttgtgcacagggatggtggtgctatgctcgggcaccggggtggtcgaggtagtgcacggggtagtggtgttgctgtgcaccgggatagtggtgctatacaccggggtggtggtgttatgcaccgggatggtggtactatgctcgggcaccggggtggtcgaggtagtgcacggggtggtggtgttgctgctgtgcaccgggatggtggtgctagtgctatgctcaggcaccggggtggtggtgctatactcagggactggggtggtcgaggtggtgcacggggtagtggtgctgtgcaccggggtagaggtggagtgactgtgcaccggggtggtggtggtagagtgcacccgggtggtggtgctatgctctggcaccgggctggtcgaggtggtgcacgggctggtccacgactcagacgactcagtggacttgctccaggactcgtaggtcgaagactgctcggccggcttggaccagctctcgccccagccctcagcctgggcaggggtagcaacagcagcagagctctgagcggcgggacggatgaagtcctcgccacgagcctgcatgataccggcaaaggccgggctggcaagagccagaagagcaacggaattgatcatttcgagagaacaaagtcttaacaaacaaacttggaaagataacgagtgaagagatgatgaagaaaatttcaatgatggacacagatgaacgatcttatatgccctgtttgagaagactggttccaagtcatgacggatatggtgtgccacggtcgtgtccaggtcagaaaggtagacctgaatcacaatgtcaccatatgaggccgaatgcaggtactaggacagctcaactccagatggcaaaggcacagatggaaggccattggacaaaatctcgcgcaatgatacattcatatggcaaactcagatgcaaacgtgacagactgtagtttcattggggtaagtggtgcaggaggtctccatcttcatccactagagtaacctaatgcggaagcatggaaagagcttggcaatctccatacgtctccacaaactgcgagagtagtgagcaaatccccggggggacagcatattgcttcattgcgatagagaaaatcgtttgataacggttcaagacacatgtgttttggattatgtggccagcaaaatgctcattctggatctccagggttagcagggcggtagccatgactcacctccggacagggggatagtagatcatattcaaacggaaccacaattgatatgacaaggttcctccgattggggctacagaccccacggagacgaatagcctcgtgggctaagctattggaccagaagcaggcaaaaccgcaagtacgaataggcgtgattccatccaagattggagctctggaatgtgggaatagcctccgattgagtatagggccgttccattggtaggtgccaccttgaaagaatgtacacgcgagctcgacgtatttccggagcacaacgatcctataggctcgcaagacatcttttctttgagttattaatcggatgtggcccatcgtagcatcggcggctgcaatcaatgacggggacatctcaatctagtatgttgtactgggttaggccaagcctccactgcgcgaagatggggctttcgccgcattaacattgtggctctcatcagagattgatatcggaaaagtcttcaaccaatccgagaatgtgatctgtgcagcctgcacggttgttattccatttttttttggaacagcagggaagtctagatgtcatccacggatcctggtgaatgagaggtacagcagtgaggtactacgcagatttggccgcaagcggtaagtggatgagcatagtacctcgatatcctgactgccctccatagtaaaagcaaggaacaacccgctttcggtcatatatgatatttccattttaggatagcacgtgacgtagggcttagggcagacgcgtgcacggggcatcgcgcgtcgcgcgtcgcgccttcctgtttgggtccaattaagccccggagaatcttgaaaagagcatctgctttgcccattcgcccacaatgcctcactcagtatcatccggctctgcgcagaatgatgatgagatgccggatgcccctccagtcgagacctcaactgagactcgcgtcagactcgaggatatgttcgacggcgatgatgatggtgatgacgatgaggagttcccggcttccgcagatgtgaagatggattctccgccaaaggaagagtgagtgctaagctcttgtacagtaatattggactcgactgctgacagaggctcgcaacaggcctccagcaccaacaccatcgggtgtggacccagatatcatgctcgccttttatcaacgacttttccccttccgatacctctttcaatggctgaatcatggaattgtacccacaaaagacttcggcaaccgcgaatttgcattgacactgcaaaatgacgcctatctccggtaccaatcatatccaactgctgacctgtaagacccatttcaactttgattgtccgatcccgtttgagctaacacgtatgcccaggttccggaaagacatacttaaaatgaacccttctcgtttcgaaatcggacctgtctatagcaccaacccacgcgatcggaaaacgctacgaggcggtcagatgaagccagtctcgaaggaattggtttttgatattgatttgactgattacgatgatattcgtacatgttgtgtcaaggcgaatatttgtgctaagtgctggtcatttgtgacaatgtcaatcaaggtcatcgacaccgcactacgggaggactttgggtttgaacacatcctctgggtttactctggtcgtcgtggtgctcacgcctgggtatgcgatccccgtgcgcgcaacctcacagatgaccgacgccgagccattgctggttatcttgaaataatccgcggggggtcacaaagcgggaaaaaggtcaacatcaaacggccactacacccccatattgtacgcagtcttgagttgctcaaacacgactttgcccggaccacactcggtgatcaagatacattcgaatctgccgagcaggcagaacgccttctgtccttgttgcctgacaagaccttaaacgactccttacggaggaaatgggaatcctctccagatcgtgccagcaccagcaaatgggccgatatcgattcacttgcaaagaccggtaagagcagcacgttaaacccggcgacgctcagggatgcgaagcaagatattgtcttggaatatacctacccacgcctggatgccgaggtcagcaaaaagatgattcatttgctcaagagtccctttgttattcaccccggcactggccgtatttgtgttcccatcgatcctcgcaatgcagaaaacttcgatcctctttccgtcccgacggtgatgaacctacttgctgagattgatgaatatgacgcgaaacactctgtcggcacagcggaggcagatatccccgacgctgaaggcagtgcgatgaatggctccgacattaagggtagccgtaaggtgcaggattatgaaaagaccagcctgaaaccttatatcgatttcttccgttccttcatcgcaggcctcatcaaggaagagcgtgctggtaagcgtgaacgagatgatagtggccctgttgttaaggctgatcctatggaattctaaccgcatcgtgttcatgtttgttccatttgcctagcgttgccataggattatgactttatgttttgttaattacctccaccgaattttactttggacttatatcaagggatcgcgcttgggagttggcatttattgtgcatggaaccgagttatttgttatcaatcagccttattctacctttattatattctcattcgaaactatcaattgaatagagatagggtgtgtcgatgaagcagttcatgaattagtttacgatgaagcaagatatgatatgaatgacactttttgctaggggttttcaaattgtagtatctacaattatgaaggcgctactgaacattcagcaggtcagatccatgggatggctgtatcaataccctggagataatcgctcagctgtggaacttatcaacttggaagatgttgaaattaagttagagtcaggagtacgagtatagcaatgtaataagtgaagtgattgtatattggaaatattggtacaaatagagtcgtacaagtaattgcactaaagctagccatgatatgttggcacacgggtggtatctccatatcaggcagacttctcattatcaaaaggcgtctctgacaggattaaaaagaaatgggccaaaggttgaatgtggtagtaaatttaagcaccaatgaagttcttgacggctaaagaaaggtattgttagcacgaatcacggaaattttatataggaagggaaacatactctccaaccagcgcaagtactccttctgctccttgacggagatgtagtcaggaaccatattagcgaactcggcgttaaggccacggtcctcgaggtagcggtcccagagaccctgaaggtcctcatcgaggttctcgaagggaggaccggcgtagaggctctggcgagcccagtccttctcagcagtctgggactgagcgagctcggcgttggcgaagtgggagacctcctcgatctggaacacgccgtcctggacaacggtctggatgagaagggcaccattgttgggtttctcgacggtgatggtaacacgggcagggaagctaggctcgggctgctcgatgtcctcggcggaggcctcggcatcctggccgcgggactggttctggaagtccatctcgtcggacaaagaggcgtcatcaaagtcctcctgttcgctgatgttctggatatcggcgacggtaaagctaacacggatgctaaacaatcatatgtattagcattcattgaagggaagaaagagtcgcgaggaattgtatgaatcgtacttctcagtgccgaacttcttggtcaggataacctcctgctcgccggcaacatccttcacctgccactcgccatccttaatagtctcctcgatggattctaattgctcctcgaattcgggaatctcggaagacttctcgtgtctcagctcatcctcgagcttggcgagaagctcgatgtcgactgtaaaaaagtaaaatccaatatcagcgtgaggccacatacgaagtccgccaccagacaagctcggatttcggcggactcttcagatatcatcaacgcatcttaccttcagacgaaggagccttgaagatgctggaggtcgagaaggcagcgtaggcgggcttagtggcctgattccatgattgccggagagcgggcttagggaatgctgggcgcagagccgaagtggcaatggagcgcgagaaagtgcgcgggatagagcgggtgacggtgcgaagagaaagcattgtgaatgtggatgggtctaaagttgatgaagatgaaagagcttgggaaaaagtaaatggagctaaagttattacgagtgccaagacccgcgcttctgttttggccgactttgcgcggccacgcaatttcattcgacgttaggcaaaaaggatatataatgttattggccttgattgaagagaacattgagtaatttggattgagtggaattcatatcgcgattcgctgcactctacgggatgaaagaccttgcgcatggaagaaacataaaattgattccgtaagtccatttttgtatgacactaggctcgctgacccttagtcctcattacaaaatacatccaccatctccccggcttctcgaggtccactgcgtcattgtgctcataagtggcgcaggtgaatactttaagtcggtcccccgggcatggagaaagtggatataggagtagatttatttaccccaacactctgcgcgttccaccctcgcacccaatatgtcaatacaccattcgaggaagatacagtgtgtgtgtgattcatttacgctgtcctctcgtcgaaacgatgtgcagcctaccactactatatgtatgtttctatgtatcgtgtaccacttcctaagcgaacttagagcctcgccgaggcctgctgtggcctatgccgttgttatgtttgcgctgcccttatggcgcgcgactttgaaaccgttaacagtaccctcgcagcttcgatcgcctcggcctacccggcgtttagaccgttttctggtctctatccccttaagcttatccgttattcgtcgattggctcgacagagacgggttcccgatcgcttccggccgtaggagtagactcagataaacgagggataactgataaatgtacgagaccattttattagaccattttattcgatattacgagatttgcccggggcgatacgaaccatcgtttctgagtaaagagaaatagtagcttatcttatttcaattctaggatgtataaacattgaacccgtctatttttgcggggtagggccgcttgataccgcgacgatcgtttatataatcctacgactataagagcacctacttcaactctacttttcagcaagtccaattctagagtcccgaggcataatttaggctacaaactgacagatggcgataataagccctcctcgttcaaatagctcttcttcaaaagaaaatcaatgcgtcaaaaacaagttcgtcgcaaatccaatttgatgaaaaaggcgcacgaatatagtaagttatgtgaagcagacgtctgtgtgcggattcgccttgggaaacaatatagactaaggatgtcgcataaagtctagcggtcactccgcaagggaagtggtcactttatatcgaaaatacagcgacttcgcaatactatcgagtatctacggccacaataaaagcgaacagtataatttatctcaagttcagtagttcattgatctaagatgcaccagcattttcttcctcaagatagcttcgtccttctgagcgtccttctcagcgtcttttgatcgttctcctaaacgtcgggtccttgaaacgtccttttaagcgtcttctctcacccctcttctctcctcacctcttccctccttaagtttctttctcctcggggcccttatcttcaccgctaaacaccaaaactgattgccaggttctattctggttgaccgcattcgtggtctctgggtctgcgtccgagcatcgcgaagacgcagcgcccgatcggttccagggcgcaggttatatcctccagctcggctgcagggagggtaaggagctcatttctaaaccactgggagttgacggtgcgctggataaagccaagggtctggagccgccgcctgaactccattactatagtccagtgcactgccgatctcgtgtgtggttgaactgccagcccagttcctcaaagtctgcccgtgatcaatctgcgagctctggggtccccttccacacctagtcccagaggcagtctacgtatcaggcgaggtcggcggttgagatctcaaagtgggtgccagacgggtccctccccgaaggcccttcaggaactcgtaggtcttggcgccattcttctcctggtggcactcgttccgaaaatcacagccctagagggcaccgcataccgatctcatccccttcacctccgggatgtatcctccgccgtgacttcgcactccagggcatcagtgttccactattgtcgcccagaagtaaatagtactcttgattgtccatcacggagtacctgaaagcgtacccactacaccacctggggccaacgagagccgccaaaatcacgcccatcgtgttcaccgggggccttgtctaatataataattaagtcattccggaaaataattcctatgagaaacgatgtcattttgatgttgtcgagagcttcaagctgaggcagcttattttctagaggaggtggtggcaaaccttcaagtatgctatgacgatttaactgaatgtctcaacgtacgaaatgtatacatcatgatggtgggggcctttacaatatgtacttttagtggactgcagcaaagaccaaagggttcgtttctctcctttccccatttatcagagccagttgtcaaccaaagttaccaaaagatgactatcccagatgaagtcgatatcattgtcgtcggcggtggcagtgctggttgtgtttccgctggccgtctcgccaatctcgatcataatctccaggttctgctgatcgaggcgggcgaagataacctgaacaacccacagtacgtaaatatcactggtgtattgactacatgctaatgcttaacagagtttttcgacctggtatctacccacagaatataaagcttgattctaagacagccaccttctaccattctcaaccatcgaaagctatagatggacggagagccattgtgccagctgcgcgggtccttggtcgagggagttcaatcaactttatggtaatctgcacatgtcatttcttgtattgaggttcatctaagtgaatagctaggtgtatacaagagcctcggcctcggattatgacgactttgaagccaagggatggacaacgaaagagcttctgcctctcatgaagaagcctgaaacctaccagagacacagcacaaagcgagacgtccacggctttgacggtccaatcaaggcctcctttggaaactatacatatccaatcatgcaagagtttctccgtgcggctgaatctcaagacattccagtcactgatgacctgcaggacctacaagctgggtaagaactcgacatcctaagtagtaattgcattagtacgtttcggttatatattgacttgctgtggacctctagccacggtgccgagcaatggactaaatggatcaaccgtgatacaggtactgcagtctatctcttatctgatcttgcaacgtatcatactgattactttgtggattaggccgccgcagtgatgccgctcatgcgtatgttcacagcactcgagaagattacgaaaatctttacttgaagtgtaatacgaaggtggttagggttattattgaaaatggaacagcagtcggtattgtaaccgtcccagagaagcctctgaaagatgaaaaaatacaaaagatttacagagcgcgcaagcagattcttatctgcggtggtaccctcagctcacctctcatactccaacgatctggaattggtgaccctaaaaaacttcgtcaagcgggtgcgtccaacttctctcatccccagaaaccttgagatctgtcattctaagaagcttcatacaggcatcgaacctattgtggacctgccaggtgttggttgcaaatttcaagatcatcaccttctgttttctgcatacagagcgagacccgacactgagacattcgatgaattcgttcgcggaaataccgatgtccaaaatgcagctattaatgaatggatctctaaaggcactggtccgttgtcaacaaatgggattgaagcaggtgtgaagatccggccaactgaacaggaacttgaggagatgaagaattggcctacatctgattttctgagtggttgggagagttatttcaagaataaaccagataaaccggtcatgcactactccgtcattgctgggtaagaattcaaaccctctgtgagcttctctccagtttctaataaaaggtcacagctggttcggcgaccatttgcttatgcctgggaaattttttacgatgttccatttcttggtaactacaatgaagcacttgatcctatctagctcctaacaagaaatgcaggaatatcctttctcccgtggatggatccatgtgaaatccccggacccctatgaggctccggactttgatgcaggatttttgaatgatgaccgtgatatcgctcccttggtttggggctatatcaagtctcgtgagacagctcgccgtatggatgcatatgctggtgaagtgacctggatgcatcccagttttgcctcggactcgcctgctcgagcacatgatctggaccttgcaacaactaaagaatatggtggtcctgctcatatcacagctggtatccaacatggtaaggaaaccgcagtgattgctgtcgtccatcctttactaaaccatggttataggttcctggaccatacccgtcgatcctggaatgcagctaccagagagcgtgatcagctccagccggcaggcaattcgggagcccatcaaatacagccgggaggacattgagtgtattgagctctggggtgagtatacctacttccccatcttccttcatattctaagcacaattcccagcgagacgtcatgtagaaacaacatggcactcccttggtacgtgcagtatggctcctaaggaaggcaacttcaaagtcaagcatggaggagttgtcgatgagcggctgaatgtccatggtgtcaaaaacttaaagatctgtgatttgtcaatctgccccgataatgtgggtactaatccttacagcgtaagtcttccttgtcgctgtgttctatctcatttccttcagcgaaatctggtattaatgaatgttttttaaggttgctctcttaattggcgaaaaatgctctgtcctgaccgcggaggatcttggatattcgggctctgatcttgaaatgaaggtgcccacctacaatgccccaggtgaaactgttcatctccaccgagtttaacatgaggacaacggtccaaagagcgtattagatagttttgggattctagaatttcacttttcttgagactgtattatcttagtcttgagaacgggacttgggcgaggtcgtgtctttatgtccggatgatgtgagtagaggttacattacggtgtattggggcgccaacccgaaaacagcaaagctaaccagatgtagtaattcacaggtccctatattactctaagatagattctattcagtgtcagccatctcgaccttttactatatggtgtaacggaacacctgattggaccacttttaaaagaccaacctatctatctgtaccgtcttctagatcctagcccgatccagcggtaatcccttcttctccgccttatcctgaaccagcgcagctaaaggatcaagaccaagcttgtaagatttagccggtcatctaaaacctatagctgacgtatgagacgattatagcaattcttaaggatagtccgtcttcctggcccggcacagaaataataaagttgcgctagtcaatatctaccttgtgaagtagcagttttcgtctgttaagctactattagaaaccaggagtcaattctcttatcctagctttctggatctactgaggtactactattaggaggattaggcatttttagtctgggagtcagtagagcttttagtatgtcatatcctcgtatcgagatatactatcactaagggtaaggttgccgcaactattcggccggtaagtgctagtcttagcagccgatataagaaagtggtgcttataccgtaaccttataggtcctcgaaggaattcaatatctacgcggtcgcgggagagccctcgccgccttgagtaccaataccatattgctcacggagtccggtggagtcaggatcggtaagtagggaacctaagcgcacctggtgggccagataagtatagtttactcacggtgattaatgttatagtagaagtggagcacaggctacagctaccaaatcgatacagccgagatagacgcgctaactctgaagctattcgctttagctaaggttataaaaaggctgattataaagaatcctccacactaactatcacactcttataacttggttcgcgaaccttaactcgaaacacgcccgtccatatttggaattgtattcgatccatgatttccaagaatagactttgtattttacatgacgcggatgggattctgccagatgtattttactcgagaatgccatacaatcgcagaattgtatagtaacggctgtatgtagatggacgatacaacagcattgaattgaaatggtatattcgagaatattcggctgtacagaatctagaagaatcaatgtacccataatgcgccaacccagtctttttggacaccagacaaaaaaatatagaaaaaaggaatcgtgagatcatgacatgctcttcggtgggaaagtagacgcaagtttgtttccgtcttttgtgaaccgcatgaacttaatcgcgctgagacccgaccagtgtccattccagttcttcattgcggtcattgcatattgatcgcctatatcaggcatccacagtccggtctcgaactctcgcgcctcggtttgcacccgctgtttcaaggcctcttcgcgcttgctaggaggacgtcccttccggcgctctgactcgagctgtttgatttcctcggtatcacggtcaatgtacctggtttggattagtcttgggtttggtaatggaccatcggtggtgcgtacttggtgacaaactcggaaatctcttcggtcgaaagggcctcagtaagttcttggatagcctcatggatgtaatcaattcggtccactaatcgagtcagccgggtggccttcaattgaaatgggcagttgtctcacagtatggctgtcttgcacggttcacagtggcgttatggcgggacaatcgatcatcgcgagcgccagctttgcgaagtcggtgggcatcccgactgttctcatgaagcacattagtagaggtgcgcttcttagaaatctgcttgtgcacctttgtcaaggtaacaggcatggttgcgggctgatgacaagaattactccaaacactccgccgtggatttcgacgataattttcgtggatgcaacggcataattaagcggtgaaccccaaaatcaccgccttccccactcgaggaaagcgcgtctgcgcgtcgagataggcattccaggagttatctactccttcaatcctttaaccgggatttgttttggacctgctattgcattcaacattcattagtcttctgccggtgaaaatctcaacctatgttaccacttattgcttgaatacgaggacccgcctgtccctcgaacggtgtccacaatgggcatcaaaggtatgttaactttgtgactgtctaggggagatgaatggcgattctaacacagacaaataggactgcacgggcttctcaagtccattcagaaaccatgtcacatcaagaatttcaatgggcaaacgcttggagtcgatgcatatggatggctgcatcgagggactgttgcttgttcagtggatttggtcctggacaatccgacgagaaagtatgtctttcgatatcttatcccatgaactgttgactgacaattccatcttatgacagacacattgatttcgtcctcaaccgagtccgcatgcttcttttttttggagtgaaaccctacctcgtttttgatggcgacaatctgcccagcaaggcaggcactgaacaggatcgctacagacggcgccaggaaagcaaatgccttggactggaactacaacgaaaaggaagaatggcggaagcttaccaagagttccaaaaggccgtcgacgtgacaccctatatggctcgccagttaattgaggaactgaagcaaatgaatgtgcagtatgtggtggccccgtacgaggcagatgcccagttggtgtacttggagcaacagggtgacattcatggaatcatatccgaggactcggatttgcttgtttttggagccaagcgattaatttccaaattggatcaacacggcgaatgcattgagatcaaccgcgccgattttactgcgtgtcgcgaagtcagtttggttggcttcagtgatccagacttcagaaacatgtgcattttgagcggttgcgattacttgacaaatatccctaagctggggctgaagactgcctaccggattattcgcaagcatcggagcgttgagaaagccctgcgcatgctccagtttgagggtaatttccgggtcccagccgactatcttgccaacttcaaacaagccgagttgaccttcctttaccaacgggtcttctgccgcaaagctgaaaagctagtgactttgacaccacctgataaggataccaatttggctgcgcttccatatatcggcgccgatatggagccggaaattgccatcggagtttctcgtggcgatttggatccaactaccaaggaaccaattaccctgaagccactggccgcaggtagatggtcccttggtattaatcgccgccagacattgggtacttcctctgagttgaagccaaagaagtccatcaattcgttcttcactcccaagaggacaccgctggccgagctggaccctaacagcctaactccgtctccaagccagcagcgactcctagagcgaaatgcgagcaacagctggcaggccaatgcagcgcccttccgctccaactcggtcaggtccacgcctctcagggcgttttctgaccaaggtctcagccctatggttcggagtgtggaacgctcctcttttctggcccaaagtgcaagatcgtcggccttgcagtgcacaaagaggcagaggctgtgctctgaggccgagggggattctctgcctgcttgtccccctgctcgcagtcggttctttgctcaagccagccctagtcctcaagatctctcccggtctaaacggtcacgcaaatcagtgatcggtgtcttttctgatgaaattgcagaagacataatgtgcagcattcctgatcccagtactacccctgggcctgccgagtctacaactgagagaaaccttgagatatccgacaagcccagtgaagttgataccccttctaaacctacctccgacaaagtccttgtgacagagaacctcgatgtatctcagaatagtcctagggataacacaccgaactccccaggttttagtctggctcttgactatcacgttgaccggcaaaactcgaatttactctccaagtttacttttcaagctgggcaaaagcccgaaacaaccgcagctagctcgaccatgactaagattcctgcggttcagacttcccatagaccttcaacgccctcgacccccagaagcccagctgcgattgcacggagcaacgtcttccatcgacgcctgacgccgctccagcggatgggacagtccgctctcagtcgatctcacagcatcaatattcctactaaactccgggatgccgaagctgttgaacctcggactgaagcttcatctcctatcgtgcataaggtgtcctctctcgcaggaatccaaggcagcgaagatctcattgtcccagacagtgaggatgaagaggacgaggatgagcccagcacagggtactcaaccactcttgatctgaaacgctttgcttttgccgcgaattaggctgcatctctatctgattacggagcatagaacaggaacatcggattttggtatccggggtagcattggaccactgatttggtaggttccactttggcgcgtaacttgtgttaatacggagtactttggttgggtttattgtttgacatagcgttggttagagcatactcgaaaacctgaaacattgaaacgtgcccgatcgctagcttgtaggtactccgtgcatcgaagtgcatcatgtagacggcccaatattgaagaggctgggtgaatcgcgtggcttgtggatgtggggcgaaggttatcgagatctgcactagtccagatcgggactagagcggccctggctttcccgtgtccggcggcagaaatacccacacggaaggcggtctacgctggttaccggggaagcgggcgagtaaacaagggcgttggcccagcctcccatattttcctatacaactttgcctcatccccagcctccagagagattcagagaatcggtcaattagcctgacgttgagttttgtgccatttacgatcccttctttccatcccttccattctttctacacattctatctctcccatatacttcccacctgtactacacacaggcgtcaagtcatatcataatatctgacccatctggataatccactctaggtgcaaaccggattccacaataatatctaacatcctggatattgttctaagtattctcggcattggatacgtcaacgatctttatcctactctccgcattcttcatctacattccattccaacgatctcgatctcgattcaacgctcatcgcaaacacacgaaccaacaacaagtgtgccactggtgtacaattcagttcggtgatcgcattcaattcaggcaactccttctcggagacccgagaagcgagtcaacaacaaattgaaggagtctgaccccgacgtggtcttaattgcacacaatggctgctggctttgctcaaagatgggcccgtaagtgacgacatgtcgaaagagagcaaacaatggcattgttactaattctccatacagggttcattccaatgatcgggtaccaccacgtgttgatgattattatcgcagttgctattatcatattatgtgagtgcttgtccattgcgccctctactggaaagctgctaatataatgcagcacttctgttggccggctgctcttcatcatctccacagatgcccaccatcttccttatctccctatactacgaaaagtataaccctattagagatctctcacaagtcgacccaggggttgtcactgccctctccaatattgtcggcggtgcagagttggaagtccgagtgggatactttggtatctgtattcagcctgataagggttctttcatctgcaatgccaatgcgacggcgctggctgagattgtcacggtggatcaagatccactaaatctgatctgggttgcttcaacgttcaaagatgccgttgtgtttccgtatctcctgtgagtaactgtaattccttaacgtcagacaaaactaattctcgtgcagaattgttgctgtcattctcgcattcttttgtttcatccttctggcgacattccctggctggcacgaggaggttgacgaaactggatccgagcgcgaagtcaagcctttcccctctcgccccgtctcccaggctgcgctagccctcattttcgtttcctcggtattcgttcttgtgtccgtattatggcagcacacggcatctgtcgctgccagtacgatagcccaagacatgggtaatggaagtgtgaaaagcggcgtcggctcttctgcaatggtgcttggctggtttggctttgtcctactggtgatagtcactgttggtttgctggtcatgatcttaagtataagtctgattcgcaaactgaccgatgaggaataatcaaaccatcctcaacgccgacgcaaaaaacacttgcgctctttgcttttctttttttttcgcgacttgcttacacctacttcttctttgcctacgacataccctacccttataacgggacgacacaaatggaaatgaataatacctacgagcacacgacactggctcgcaattcacggatggatgggaacggaacacacgacacttgggacattatgatttccccaaggggaatttgggacttgcacacttggattttacgaacatatttgaggacatggatcctcgcaggctttttattcttgggatctgactgagatatttttgtcgtttcatctcaagaccatatttggcagctctgccgatctgccgatctttcaggatagaatgaatggaatgcgattgagtcacattttgtacagatctcttttgcttgagtggaattctgttttatgttcagcacacagcgtttttttttttttttttgctcttttgatcggatcatgtataccacagcctcttgttcattccacgctgtgttcactttttcacttctcacacaggactgccaatgctagattagtccttacgacacaatgtcaaaaatgataccaaagtcaagccttcatttataactcaatctctccaataacctacaataagtgacattggatatcaaaagccccttcccattagtttatatctacaggagtgttgaatgttcttggctaccatttgctacaagactgtgtttggatatcatctataacatcaggaactatgaatatattcaatgtctgattatcatctgcttctagaaagttgtgcctcaaaaactcgtcaaagaggtgccagctgttaaagagcactcccagtaaccggacgctggtgacaagcaggctttcctcgtcaatgctacctgcaggacacaatgcaggcaaaacccatcaacaatgaagaaaggatataaagcggaatcagtatatatatagacgtcaatcattgcatgatccctcgccatcaatttgcgtgaactccgacaaatggcagctcagagctcatcactaaagcctatttccggatatactagcctgccgccaattctgacagctgcagcagcagaagaagcgtcctgcagaacgttaggcgaacaagtcgtcatgagtccctcatgaacctagttaaagccctaacaatcaacgttccgagtctggactcccgatgaacttcaccccacaggtactgtgtctttggcgtatatagcccactgcgtatggatttcattcgacaacggcgaaggtttcacggatattttatccttcaagataaccattcggtgggatgtttttggtcgtaaccaaatgaatctcaccaaatggctatctcgagggctgcaatatccgtgagacctgcctcattgtagagtgagagccgtaccctgtgggagccaaatggtttgcgggcggaagcatcgagaatccagactcggaacgttgattgtgagagttttcaggaggttgatcagcgactcataacgacttgtttgcctaccgttctgccggaccattcttcagctgctacagctgtcagattggcgataggctagtatacccggaaatagggtttagtgctgagctctgagctgccacttgccgcaccatctcacgctgctgatgcatgggatagagtcgatcgattctcttcatcagacactttcagccactagccaattagatttggaggtgatcgattaaatacctggatgagacagcaggtaagcaggtaatcggcctttggtagagccacgatgtgctcaggtgtaagatggaagtaccagagcattgccttggtcggtgcgggaatgatctcttggaagatttcaaggatctgcaggtgaacagttccaaattgatccgtaaattcacgacataaccatacctcctcatttttcctcattttccgggcatgaacttcacgaattcctgtcgcatctatcaattcggacagctccgactcgtcgtcaggattgacgatgggtacttggggaaaaagtaattcaaggctatgtaaacgaaagattgaggttgattccgttgtccttatcgtcgccgttatggagaaaatgatctgcggagcggacgatgagtcgtccgtgggatagatatatatgtatcaaaagacatcattctgcacacctgctcaagcttcgatgagaagggaaagtgggacgaagccatgggttgaattgagcaagctggctgagagggagagagagagggagaaaggaagatcaaatagagcaaaattcctatctgcccccaggcagcaaggctgcctcaacaaaccaaattgtcttaagatagaagttgcggtgagaaaagtggttgccaaccgtctcacatattctaatattgactgaccactgcttcacctagaaaagagaaagaaagaaagaccagccttcagaccacttccatcacatcccacaaggagatatagttcgtacagcgggaaatgacaagctgcacaaccagcaattcattgacgaactagcactcaggatcctggcactcctggatggccaggaactgaggcagtttcgggaatttctctagggtataggtaacattccgagaactcgctttgttcccacgggaccgaacgtagtaggtttcactaaagtgacggaggaatttattggccaattcctggttctgcttgttgtaggaagcattcatgcgagacatctgagtctgttgtaaaatggtgtagtcggtggcagctcccgcgtagtcctcgatgagaaggaagtgctcaatctcggtatgagcaggacgtggcgtcaacgatttcattggaacaaatttattccttcctacagtcactgcagcagttggcgcagtaatccagagtgtagtttcgaacgccggtgtagttggtcggttcccactaagagaggaagtaagtaggctcgagatcgcatcactgctgaccacgcctgtgaaactgtcgctcacgctattaataactaccgagaacatgcaatctggcaatggccttgaaagctcgattccaccgactggggtgtcttcccacgtcatgactgtcttctgcgccatggctttgaagattataataccgttctggcagacttccatgctaggtgctcgaagtactgataaccgaactctagcatcgaccatgcgacaggaaactagtttgaaccaattctgggatggccttgaagttggcatatggatgcaatagactacaagtgttcaatggaagccgactttggataatagaaagttacagataatgctgaagaccagcccgcgggtcagccttccgaaactgcggctttgaagactccaaatacaggttaaatgatcaatagtccatggagtaaccccctctgcctgcacctccgccaccattgtgtccattcttgctgtcgtgttgcccgtcgtgtccagtgctatgatcatctagcgacctatactggtagtattcacctcgaccacgacctcggccgcgacctcggttgttgttaccgcgcccgcgtccgacacctcggccacgtccacgatgagctcctcttcctcgcggactatcatcgtattggtgacgtccatcacctccgccgcgctgggaggagtgatagttgccgcggccataagatgggccatcagagccggtgttttgattgggccagacgacatttccgtcgtccggctggaagcgtctcttttgactcctgttcaagggttgctctccttgacgatactctccgctgtcctcgactcgtaggacaaccttctcgccgaccacagtctcaaaggtcatggctttgtcagccgggatggggtgccagttttggatcttccctgcatcgatgaggcgagcacctttgcgaacagccagtactacaattggcagtgggttctccgtgtgataaggctccgttgccgggataggtgccacgcgggctgcccatatcttgttgtccagatttccggttccggtaacctgccactttagtttcttacccaggcctccaaccttgtccaggattgaacgaggtgctgggcgtggggtgattaggatgctgttagccatgtacttcaggtcatttgattcaccaagccctggggggagcagtggagccagcaacttctgcgtcatgctgtttgaaacctctggagaaaccagataacctgtgtagaagacgacacgcttgatatacaaccgcccagagcggcttttggttacgttcaaagcagggttccgcagtgtgaggttgtgggaattgaccatgcgctgcacctcagaagcctcagttacggggtcaaggtatgtgctgccctcggttacctggatgacttcagcaaggataggcatccgtgcagtagagggtccattttggaagtctctgttcaaacactcaaagaagtctcggaagcctttcacactagcagaaggttaatacattgatatgctcggattctccaactcggttgccacaggacttactgtctgacacggtcctcgtagacgcggatttccgcagcctgctcgtaagtgaaaacaagatcctcgagaaagttttgtttgaagttcattgtggtcgcaaaccgttgaccatgtggaccaacttcgggtttgagaccaattaggtcgaattcaagattttgactagcgaccatccgcttgatgatatctgagaagccggcctcacttcgaccggtcagcaacaccgtgagcgcatctttctgctccatgctattcctaaccaaactaagctttaaaaagtcagttcaaaacacccgcaacatgtaatatgtgatagaaggcacacaatttgctcattccaccagccttcccatttgcggggctcttctatctccatgccttttcctgtagcggcgagaatgttggggtcgtgccaccatcctccagttgcgaaactatcattggtttgaaggaagccgactgaggagccatgccataattgtgggtttggtagaggacttagaaatactgaaagtgcgaatgttagaatcgagtgtcagaccatcctaagctttgcatatgctcacaggtgttgtcgaaatcgtagacgtgaattgcgcgaatttgagaaacagctggaaaatatgaaagccgttagaattataacaggagagtggaccatagtgagatcgaacctggcagctccttgttcacaatagaccagcgtcgtagcgatgtgatcgtatgcgggcgattaatcccgcttccagtgctgtacgacatattggcagcagagccaaatcgtgcaaggttctctgaaacgactgctttggcagatcgcattctatcaggttaaggggagatatgtcgttagcgcatagttgggagagaaagagggttgaagtcgcaaaaacgagcaggcgcggtgacggagctcccgagaaatcggttttgccgccgggaacgcgataaacgggacaaacgtgacttcgagaattcaacacctgcaacccacccctagcatgtcgcctgtatggatgatgtcgatttgcgacaggaaatcctccagcagactcttaaagaggtagctggtgaggagaaagaggcggcaaatccttgtgttatttgcctagacactatcaccgagccctgtgtggcacagccatgccaccatgtcaacttcgacttcctctgccttgttagttggatcgaacagcaacctaaatgcccgctatgtaagaaaccagtgggcaaaataccgctgactagacctgactgacaatccaacaggtaaagccgagttgacagcggtgcaatacgaactcaacgccacacaaggtccgaagctatacaaggtcccgcctccgagcgcaacattcccgacagttccagttactagtcgatcacgtcctggcaatcgctacggcccacggggagggcgacgtcctccacccccgccgcgaccacagtcagatgacccgctcgagcgccggcgcaatgtctatcgcaaccgaacatactccatgcgagtcgggtccaatcggttatctcagtatcgagaattgacaccagacctcttcgctcgtgacgaggagctcgtctcgcgtgctcggaaatggattcgccgcgaactacgagtcttctccttcctgaatccggaaccggagcatgaagagcggatatctcaccaagtttcgcgccctggacctcagcggctggagaatcgcagggcgaataatgccgagttcctgctggaatatgttatcgctatcttgcgcacggtcgatctcaaaggcagtgctggacaagcggaggagctgttgcgtgatttcatcggccgcgagaatggatgtctgttcctccacgaattgcaggcgtggctgagaagtccatataattccttggaggactgggatcgtcatgttcagtactcgaatactccgcgaagtgtgtctgacggaggaaatagggatggtcgctcgggtcatagaccgactcctgtgaacaatcggagtagaccacagaggtcccgaagaccatacaggcccaggtctcaagatgcgattgatcgctccaggcggctgcagcaagctcaacagcgatataatccatattagatgtgcaactagatatgaaggtgttacatccatattgttaataattgtctagggaaataatcaatctctggttcccacgttaaaccgtttcagactttgtgcttttcatttagaaataatattttcctcccatgcaactctctctttgcgacttcgaagtcgatcaagtaaaatcaagtactgtacctaaatctgggggatgaacataatcccggattatgaactggtactattattcaattgcggtatcgattatttcagtgtttagtacgtagttctcagatctggacaggcagggtagagggctcgggggtattgatgcgctatgaatatctgagatatgagatgctatgtagttatgctgaatatgaatgttttaatgtagtcgtctctccatccacgaatgaagaacaactagggctgaccgattcttatttccggcggaaacgccctctaccccgagaggaacctcctctgttgatgcttattgatcgatagttcgcatgagcttcggctttgatcttccgaggacgaggtttctttgcttcgacagtctcagcaggcttcttcggaggtttccccatgggttcttgttcctgtggcttcacggaagaggatgaaacagcttccttgattctctccgagaaactcttcggtctggcaacaggctttggctgtcctgcgaattcagggtcatcgttcgagtcggaatcaaattcggcctcggtatcaagctcgggctccgacatggtatgaagggaagcggcctcatccgcccgttcaatgtcactcgggacatcatcccagccgtcactagccgcaggtggctgttgcgtctccggaactgctacaacatcatcttcatgttccgagtcctcattcgcaagagctgggtttggtttgggtttgggtttcggctgatgaataaccggcctcatgatcactcgtcgcgtcgtccgtttctggcccttcttcttgtatttccggttcacatctggtccttgactatcctcaacctggatcttggcagcttcttccgcctctgcctcttcctccatctcgcgcatcacatcccagtcgtcatccatacgctcctcctccatatcccgcagtccttggactaaatgcgttagccccttgctggcaaatctttgcggcttacgcgagacaataggactgagtcctggaccatcattatttgcactaagtggaggatatcgaccagagttggaccgacggaggaaagatggtgtcccagattgcgcttcctggggtgatatttcatgtgctgggtttagcagatttgtgctctgtgaatctgcattatcggtcgcttccaccatggcggcataacgcattgtcgtcggtgttgcgaatagatttgcaagatagaactgcttggtctcagatgcaggggttcgcgcaagcctgggcgtctcctgctgaggctcttcttccggggcctcggggattgtgcttacgggctttcgtttggagggtgtgcggaatgcggcagctaggttattcgttcgccttgtggcggaaggcgttccaccactcccgccagattcagatagcatgtcgaacaggcccaatgtctttccgtcacgctgaggcgtaggcccaattgcggcctttaatggcgatggtgctggtagtccttgccggtgtgtactgggactaaagagtctgcgaagagtcgacggcgagtcatacggatccagttgtgcagggtggtgcttggtacgattgttggatggagtcgcaaagagccctctggacgatttgcggggtgtgacttggagagatgtactatcctgaccggggggagatgcatgtttccgctttttcgagtggctttcatatccctcctgtcgactgttttcgcgccggcttagagatgcttcaagtgccttgagacgactgtattccttgtatttagcagctagtgcatcgaaacgtttttccaattagtgatttatttttttagacattatgcaacacgagattatcgacctaccgatatccgcgttttgtttgatatcatcgcgtccagctttgcggcccctattggctgacgagaaggctttctcccacgttttcaattcggcgcgaacattgacagcttgtgcaccgacctcagcactggaagtcagagcgttgtcggccattattgcattgtatgtggtatcagacaacctagaagaaaagcagtccgtaaatccatcgatgcgcgtcacgcgacgcgaactgattaacgacaagattggtaggcggtctaattctgcaattatcaatcatttcaatcaacaccacggagtaactactccttggaaaggatatgttcatcggcttaatttgcccaaggtaataaaatggtggctttctagggctatgtacttttacctaggaaaaggaatgccgaggatcatccatcataagtggacttactgccaatcgtacattgtagcgcattccctcccagctacccgtacgaccactcggggggaggtacgtagatagtcactactggcaatgatacagcgaattggaagtatttaagggctttgagatctccagcggccaatgtcttatctctaagtgcatatctaggctcatacgtgtggattgatacgtagttaggttttgtgttgttggtgtctttttctaactgaccaaaagcttgtcgtaacagcactttgctctagacgagacacagctctggcatagtagctttctaatatcgcatttcgcccggcgttgtttgcaaggatgatacggtccttgaactatacgctcacatttcgggggcatagttgtacggttgtcattgtggtacaacacgaaggaagtgaagaaaaagtgggagtcatcgtactaggaacctgggaaggccttggtcaagataaccgaagcggagacgcgaagaacggcacctagcgaaaattgacggatgttccaactgctccacatgcgaaggactaaagaagtgaagccatccctcctttcgtagtcgcaacagaaatattgggattatggagcaatgaccccgcggaaaactgttacctcatcttcatccccgacaagcgagccataccaaataccaaacgccgctccactgccgactccacaaactagggaccccatgcgaccccattctccgtctccatctgcatctccacgttaaagcaaggaagaagatccacagctccgccggcaccactgatctcttccatccaaacctgaggcatgtacgaagggcatatcatcgcgaggctcatagtatcgtgctcaaagattgtgagcatgtcactgcccgtatcatttagcatgctgatatggaaaaaggcgccattaccaccttccaatagcggaagacggatacgcgctttgagctaaagccaaaaccgcatttagaggatatttcaaaaaaaagggaaagggattagtgtccatgaatgtaagggccatgtccatagctggccttctgtacacattgctgcgaggtacggttcccacgctatgttatattagcgataacagaaaagataatagagattagatcaagcttacctcgcagaaatacggcttcttggccgcaatacactcttcttggctggcaacacgcccgccgaccacgaatacctcgtcgttcaccgtgattgttccgttttgataaagctcaatcacggtggcgacattcttcgcttgacttgagcggtagagagggtcattcggatcaagcacgcgcgcaagagcggcagctctctgctcgttggtgggtggagggcgaggcaagcggggctgctcccagaattcagcgggaggttgtttctcggaattctgattggattcttcgggggttggcgacattttggattctgtaaaatggaagagaagaagcaaaggagaaggtcttactgagttgacgaaatggttagattcaaaccgcctaccaattgtaggtcgctcgttacgcatatgacggtttccgagtagcacggcgaggagcaaacatcgttcgataagagaatgaactgcctggcttcagtcggggagcagcttcgagattttaattataatcacacgtcattttcgcttctgttggtcgcagtccttctgctctattttctagacagctatatcgaatgtcgtcatcaatctgcgtccacggcacctctccccgagcagtgcctgttcgaggataattcactcggtactagattataagaagccattcgtaccgtagcgactccagaagaaggatattagagtttaacagagtgaaagttgccttgaagcatgctccggataaaaaaaacgatctgatttgatcactgtggttcctggtgcaatgcaagagacagaaaaagagcgaaaaggatttgatacataaaactgaccattcaactctcgcccaaagagccctgtcttcctcctatttccctcgctatgaatgcattaaagatcgccatttgaatcaaagttaaacctagcaccattatcttcccattaccaactcgtcaaccctttcacccgatcaaacccacccctcaactgcgactcaggatgaacaaccttcccctgaagaatagtgtacttaacaatgccctcgcaatgctcaggccgcacacgcgcaagccaaatcatctgctggtccttcttgcgatagatcaaaacattcgcagagaacttgtgcccgccgacatgcgatacgaagaagatgcccaccccgccgacccgggagtcatccggatcccggtcgagtcccagcggacggagttgtcgctccagctcgcgcttgatgagtggcgctgtgataccacagcgcgcatctcggcgtccgtgcgagcacagtaataccacgtagtcgagttcacaggctcgagcgttcattccattcgcgggagagccattttgctggtcgctggggtgatcgatgtatctggctatcagatctgggacgtccttttgcgtgacggagtcgacgtatgtgaatgacgggaggattagtactgtggtggcttgggtgggactttcgtctgtagttggctgttctggaggggtgagatttgatgctgacaccttgatacgctggatcgggtgttagtggtggtaggctaaattttgattataaagcttacaccgtggtctgattttgccccgtcgaatgcttccatcaagcttcctgtcgtgtattcgacattcttctccttccagtcggattgccccgttgcgacgagaacatgggtctggaattctttgatatcgccataaagaggccttgaagtttcgactttgactttggatgggaacttcactgtgcagtcggcgcagtcatttaaacattcggggccgtccgttttgggatccactttaggaaagaggtagtcgttggtgcccgcgcggcccaaggaaagcaaggaacgcaacatggttggaggtctgataacgctgtgaaggcaaagttgaaaattgaaagtcaaggctatgagacgttttttgaagttcagggttgcctccagggctggaaatgtggagatagatatagagctcagtatctccgagagactatactccgtactccgagccgggacaaaaaacccgaaccccgagctaatagggttatctccagacttgggtctctggtgttaagtggagatcattatacgagacccttttttatctcggggatggctttttagtttagactgacggccacttaagagtccatgtatttgatctttatctggcatgtgaaaggaaccttgggagctcgcatcctgctaacttcagggcacttcattgatcccaatgaggtgtacagcccaatcttatcagatcactcaacatcaacctcaagtttagctacgttgaagaatgacacatactgctgtctgtgatatctatgagcattgatacttgtgcttcttgtatcgcatcgaaaatctcattaaagcaaggtgtaatagaacaactagctcccgatgggggcagcactggtgtaacgggcttgacgtcggcgtcggggtgtgttcaggccaggcccatagtcatcagatggaacaatagctgtgcatggagtactatgcaattactcgtacgagcaaggcgagaaaaccaagggaatcaagttccatgtacgcatacaacatataggggcagtgttgacatggatcgtggtggtgattatggctgttctcgtgattcaaaactagaccaacatcgggaatatcgcgtgtcgttggtgcccagagattgccaagggatgcagttgcccatccgcaatgcttgaatgctttccgataggccttcggggattttcagtcccgaaatgtcatggaaaggaagatacccatgtccattccatgcaagccaagtaaaccccttagtggggtctggattgttcacggaaccatcgggactggaatatgtgggccggggaaagtaaacccgatagacaacatgagggaaattgtgaaagaataagaaagaagaggaattgcttattctttcatcattcgagtgatgtataaagaaaagaagatgaagacaaacaaaacaaaaaaaaaagaaattgccacgcgacgtcggtcagactttccagattgggcggttccacgggcgcagagcgggaccacgtaagcgggagctggagcctattcccagaacttctcaaacatctcggacgtaaggtctttcctaagtataacccgagcctccaaggttatcttcaacaccgagtgcatggatgttcaagggaatgcccagcccgaacgcgtgcggaaacgtcgccgccgcacaatggcgtgcacgcagtgtcgcacgcgcaagttgcgatgcgatcgcgagtatcccacttgcagtcgctgtctaaaaagcagaacaccgaacaaatgcacatatgaagatggcttcttatggcagcagcccaccaccgtcccgactaatgcatttgcctccgaccgagggtctgcggtacctatgcctagagatacaccagtcgacacaccccgggattcggggataccgatggtgtcaaaccggccggaacctttcccaattagtgaaccgttcccaactagtgaaccacctcgtctggcaagggctggcggtccaatgcatcacgagtaccatggtcttaccgggaatgcgcttgcgccgccctatcgaagtcgaccacacgacagagagcgaaaggactgctttttggaaactgttctcggtgtgcctaaggctgctgttaatcaggaaccttacctgaatacgggtcttttacagcgtcccaagcgcccagcgccggcgacggagcatgatatgcaaacaccgtcgcaggtcgacgatccgcacattgacgaagaagaggacccattgtcacctacggaccagctcgacctctctcctcgaatgatgatgagggggcgtgagaccaaaacgcggtttagcggatcgggtatctttgccagtctagtagcacaggtctgctctcaccatttagattctaattaccaaaatacggaggctgactattattagtttccggatataaagccatttgcagatgagatcaggctttctaccccaatcttcacgcaacttcagtcagacctaagaagggttaaacgcgggctattgaaacatatggtgctcaacaggcccttccccgatcctacgacggcttcgctgattaacatgctgccctcgcgtggtgtggtcgatgagcttgtcgggttgtatatcacttatatcgagtctactcaccgcattcttcatgttccatccttcctacgagagcttgaccaattttgggccatgttagacagcccggcatcaatatctgctgcctttacagttcaggtactgttggtccttgcctgtgcctggaaccttgcagattttgctagtctgcaatcaaaaagtgcgggcgaactcaagtgccagtgtgcagtggagtggacgttgcacgcaggacaatggatcgagaatcttcacacaaagcgcccggagatcacatcaatgcgactatcgattctgttgattttggcgcgcaactcccacgggatgaaacgcagccaggcttggctcacaactagtacattggtcaagcaagcaatgatggcgggataccatcgcgatccaagccgatacacacgtatctctgcattcaacaaagagatgcggcggcgaatatggacaaccattgtagaactggacctgcaaattgctcttgaccgggggatgccaccgtcagtacaaagcttcgactacgatacggctccagggctgaacatttacgacgacgagatccatgaggacagtactgaagttcccggaagccggccattgaatgaaatcaccgactcctcgttccagtctgttctgagtcgctcactacctgtccgcctccaagcatgttccctcatgcactccccacgaattaactgtcgatatgaggatattcagcgtctggacggtgagctcaaccgccatctttctcgaattcctgcgtgggttgcagcagaccccagcgacatcattacacaaaacaagatcatactatggaaaggcttgattgagaccaaactttgccagtctctactgtctgtccacactccttttgccatcgaagcactacaagaaacactctttgctccctccgcgcgtactcgcatggatgccgcaaccagaatactgtcaacccagcgccggctacacgacatttcacgaacgctgtcgctatgtatgcttggtgaatggactatccaagcctacatttccatctgccaagtgctacacacaaccgaattcgatgcctgtaagttttttctattataataattgactattagaacccaacctgataatttgcagcccaaccctcatccatctcctctgccttcattctccacaatatacccggtatccccgaatcgctcctatcactcgttgaaacagccctgatcgccttggaagagcgctcccttttggtgaccaagggagccaaagactattatttcctctcaacgatcgtcggactagtcaaagcccgactttggcccgcacaggcaactatgtacaagcagcaggttgtcgagcgggtcctgtcatttgcgcagatcctcttctctcggcatatgaactgcgaccacctcggcgataaggggatgggcaatttcaaggacaaccaggtggctgcattcatggcggctccaacaatggtgcccgtcatgcaggccgaatttgatcccaatgggatgcacccgccactgcaatctggcggcatggtgagttccattctatccttggttctcgtcttcttttgtgctaactgggaatttctagccatctggcgatttcgatcctttcttggacatcttcgattgggaggatctgacaagtatgacatttccctgttgaatggaacagttcggccaagctttgcgtttttctgcggactgcacgatacacacttccactttctgcatttgctgtactcctaaaatttgtacaatagttgaacttgctcaggatacccatagtaaataccaagaaatatagttatgacaatgcggtcattcagatatcattgcgcaatcatgaatattgtgactcgatcgggtccaccatgagatcatgatcgaaggcatcaggattgacagcatgcagggggtgcagatcggacaagggaaagatcaatgccatgcttagcacggattcttatttgcacccttactgacaagtgccgagccttatatgtgactatttttctctagctttgacggttttgcgttgctttgccttgtaaagtgaagccttgtttgttactgatcgtcatgctacgtagctattgtggggatgatattcaataatcgactttgcagatcggggtccaaggcctacgaacaagctttgcagatcataccgcagtgccttttcaaggacaatacaaaacagcagaaatataagcaataggatgaactaaaaatgtaatctgatactgattcattctaacgaaagccaatcagaggaccctgtacctgatacttgcgggtctggtacctggcagtacctcagctcaaggcatagaatggctctggatcaggtacccccaggtaccattccaaatatagcggcgtctatgtaaaccccctaaaacacttggctttggcactaacttgaggctcgagggctgtgcttttttggatttcgcttttttccttgcgttgcatgtttatacggagtaccatgtgtatctctccgctttactccacccgttctcttccccttttccctgcattgactggacattaatcagagagtcatgggtatcacgatctaataaccccaattccccggccagccaggccaatctctttcataaaatccctgcatccacaacggggatataatccaatgtacataatcccgacgatgcatcacctcccactactcttatcaataatcatcgcggtcgcagctccactagcaggggccatcccagcccaagccgggacacacagtgcgacacaagtataccaaacaaccgacaaatacccactcgcaaacccaggcaacatccccgcccacgacccaaacatcatcctacacgatgagcactactacctattcaaaggcgggatcaacatcccaattttcaaatccgccaatatatccgggccatgggaaaagctcggcacagtcctagccggcgacagcataatccgcaaaggcaaccgggcacgaccctgggcgccaacaacaattgaaagaaacggcacattctactgctactacacgctgagcgcgcgagggtcccgcgacagcgcgattggcgtcgcgacgacaactgccctcgatggcagtccctggactgaccacggcgtcgtcattaacacgggcacgggtgctgggtcgggggtgtggccgtacacgatcacgaatgccatcgatgcgtctgtgattgttgaccgggactctggccaggcgtatctcaactacggaagcttctggcgtgatatatggcaggtcccgctggcggatgatctgctttctgtgaaagatgctgataagccggatgcggtgcagttgacatttctcccacgtgttaagcctaagcctgaggaggggtcgtggatgagttttcggaatgggttctattatgtttggtttagtcatgggaagtgctgtaacttccagagtggtttccctgcgcgtgggaaggagtatagtattcgggttgggaggtcgaagagtgtgcgtgggcctttcgaggataaggatgggaggtctttgctcgatgggggtggcacggtggtttatggttctaatcatggggttgtgtatgcgcctggtggcttgggaatcttggctgggaataatgacgtgtcggatattctctactatcattatttgaatacgtcgattggctttgagcatgcggtgagttgttcttgtctttgtcgtcgggttgggatttgaactgatatttctcgttctcccagcaagctcagctcggctggaactatctggactacgaggatgggtggccggtgcctaccgaaggcaaagatgctaccacggccaatgtcgccttcggttatggacctcctagctggggttacctagcaagtgttttgggtaagaggataatctcctattttatgtgtgttgtatgctgatactgagtttaggtgtatggctgtgcatggggccatagtagtggtcatgtcttgtttcttaaattccctcacgttcctttcttcgcaattttcagcgattgttctatatagcgtttttattccgacattatgcctatgaatcgatctagcgagcatttcattcaatatatgtcattggaatatcaagccatggcgctaaacccaatccatgccctaacctaatcttataccatcaaacttattcccaaccaccatccacactaacaatctgtccagtcgtatacgacgaagcatcactgagcagaaagacaaccgtttgagcaacctcctcgcccgtcccaatgcgcgggatactagctggtggcatactaatcccaccctgaatctccttcgccatgtccagcaaaggcgtctgaatagaaccactaccacaaaacccaattagcaaaacccaccgaaaaacactcttccccaaatactcacggcgcaacagcattaaccctaatacccggccccacctccttagaaaccgactttgtcaacccagaaacagcatgcttcgtagtcgaataagcagcatgcaacgcaaaccccttaatcccctgaatactcgacgcattaacaatactgcccttccccccaggcgcagtcgccgtaatcgcccgcagctgcgcgcgcagacagtacatcaacccggtgacattaacccgcatcaacatatcccactcggcgtcgtcctggtcgacgaatttgctagtgccgtggttcttgccgatcgtgccggccatgttggctgcgccgtccagtcggccgaagtgcgagactgtgctggcgatccagtcttgtacggcgcttgcgttgctgatgtctaattccgttgtggtgattgtcgacgctgtggaggaattggagtcggtttcgattatttgtcgtgctgctgagaggatttgcgagcttaggtcggcgagggcgaggagagctccttgcttgtgtagttggcgtgctacggctaggccgattccgctgagcccggttatggcgtatactttgcctttgacggagtccattgcggtggggtttttgatatgtttggtctgggaatgagagatttatgaacttggagagtagctgtgttacttgaatgattgcggggatcggagattctccgtggctaatatgtatgcatgtccgggtatattcgagctgcatacaacatagataataggctaaatgatgtgtttagaaagttgaatacccgtctgccccacgagatccattgtataaaatcgagaggatatacataccttacgaaagcaagcatagagtttgcataagatgatgataatagccttggcttattgatttgatcaatgcatcagctgtgtattctattgacctaagccatattaattgaatatatatccgcgacttgtcttgcgtatatcagctttccagatttacatcaatatctccacatctaaccaactccaaaatcacaaatgggtatctcaaaatgcaaaatcaacactccaatctcaaataaacatccccgacagaagcattgtcccaaccaccaaagccacccatcccaccggccgcctcacagccccagaattcttctccgttttggtcccatatacaaccccatgagcattcaagcagtacataactttcttcgcctcggccgaagaaggcacatcacagatcgccgtacaaggatcgggatcctcatatatccacaccccattcgggcagcaggactgcagaacagctttcatatccctgtccggggctttcgtctggtacagcggcacctgattataatattcgatattggcggggatggcgggcaccgcgtcgcgcaagtcgtagcactcggccggctgtgtgaatcgtgtgacgttggagtcgctcattatggggggtgtcatggtgttttcccttgccgggtgatccggtgcgaatgctttcgcgacgcgacgcgaaacagtattttagctgttatttatggcggggatgtgcagtgctgttgatcgcggttcgtggagagagagggaggcgtggttcgacaatgcagagaggcgggatggtcgggggagtagagagaaaggacattcggggattgttcagagcatatggaactagtaatgtcctccaggcctctctttttttactcctgagcacgggggggcaaagcgccaagcccgcattcccggacgttggagatatttgcctgacaagtggagatgcgggcctgagtattcagcttgcagcgaactcctttttgggcatcaatctaggtaatgctgttagagtgagacaaaaaggggaagtgggaactgatatttcgatttctccttgctgggctatttacttggtgagctatattgcatgtctttctatatacggactagtacggaggacttctgctccttacggtcagatttacaaccgagcggtttcattggctcgcttccacattttcttcctacgctcatgtccttcgttgaaatcagacagccatttctgatcgaacggaggtaggcgccgccctgcaccaccacgaggttccccggctagatggcggaggctctcgaagtagggctcgaagtcggggttgatgactgtgaaggcggggccatcgctcttctctgcgatgcggtcggtttcccatttttcttgctcggcgatcgagggtagggttatcttgccggctaaaaagcgtgcggcagcaacagcctgccattcgaagactttgaaggtcaacccagcaccaacctgggattattgttagcgtttgatccggggaaaatttatcgacttgatagacttacagcgcctacaaaaacaagcgttggatcatgtctgtaaaagacatgttggtagagatccggcacacgattgttccgcgtggcaacctgaggcaagaaaggcagagtccagctgaagccagttccaaaaatcaaatagtcgacgttagtctcaaaggtgccgtcttcgaaatgcacggtccgttcgccttggtcattactcgtaatgtgtgagatgggcgggcgacgctgaatcttcggatgctggaaggcgagatctccgaaataggcgttgtaacgaccacgaaccacagcaatgactggtgtctgagcactatcaatcaggctgactgcagtatcagcagcagaaacagacgctccgacggtgatgactttctgcgatgtgtaagcaggtggtagaatgacatggcaggaactccatttacctttccccgatacttctcaggcccacggtaatgcttcgtatgttgaacactgccaggatacctcgcagcaaactccttcaacccaggaatcacagggataaacggcactgcgtaatggcccgaagccaccacaactgcatcatactcctcagaccaccagtaatccgacgtgacaccgtccagcacttccgtcctgcggaatgtaagcacccatttcttgctgctgggatctttgatggcgcgttcaacagtagtattatactgaacaagatcttggtacccctttcggttaaacaagtcctcaatatacttccggatgaccgaatggtgccggaaaggcgtgtctgcgccatggcgctcgatcgaccactgggatcgaactgtaggaatctcctcttgcgagaacgacatggctcccgcgttaacattagtctccagcgtcgggtagacgggggagtccgtgaagcggtcctgggaaactacaggcgtccggcacgggaggtgctcgggaattttgagaggcgcatctgctgttcgcgcagctagaccgtcaaagtcgaactgctgtgacggttcgtcatctctcgatacccttttatttattagcgggaatcgctgaagatagtagagtaacatagtgacataccagcatccgccggctttctcttgtctctcgaatacatggatgacatcgaatgctttctcttgtgctagtgcatcgactgtaatggcgccagctgggccggccccgatgatggctacgctcttgatctgcggcatggtgtgatatttatgtttggtgagagattgggcgtgtagccgctctttatcatccaatgccgtctcggccgagcacccgaaaaggcaatatctggggtgcaaatcgttcgactctatcacgccatttgactgtgttttagcgcaaagttggcattggcggccaatgagggctctggatatcgtatataggatagccgaggtcagacttacgatatgtaaatgagaaccgctttcatttaatacattaatgtcgaattgaacatgctgaatcactcacattacaagtttttcatctttgtccatcggcctggcatttcatccgttgatctgattggctgtcggcattgaagttttaaggtcacgtgaggacatcccgggattcttcaggaactttattctgattggctgggagtttacgccttggaatttaggccataaagtcatacttctgtgtttgtttttctagttcggacgttgaacgggcattatgatttgcttcaataacaagagataatgcaatttgtaaatgattatacaaggggatcgaagcccagggtgcaaaagccgctaaactaagtaaacacatcggtagcataccgctccttcgtccgcaaattatcaaagaacttctcagcagcctcatcctccccaagctcagcaccaggcggagtctctcccttggccttcagctcggcgtgcacagcacgacgcctctcgagatacatatccttgcaagcctggcggataccagcaccaaccccagtgctaccgcacacatagattctcgcgccttcttcaaacagcttcaccagctcttcacggtcctcgagcatgacatcctggacatgctgtcccttgcttccatcggcaggacgactgtacgcccagcggacatcgacagcgcccagcgcagcccactcggcaagttcagcagcgtggatatcgtccaggccctgggtgcggcagccgatgtacagcactgccttggcgggcttcacagccacgttctcatgcagctcatccgagtcaggcgagctgcgacggccgcggatcttctccgcgcggtccatgacgaatccgcggaacggtgcgagcccgctgccagcgcaggccatgatcatcggtgtttcgagatcaatcggcggcttgaagccggagtgcgaggggcggacggtgatgtgtgcgcgttcgccggcttggagctcggaaaggtagtttgatgcgacgcctaggtagaggttttcgttgctttctggggtggggttggcgagtgctggagcgctgaggacgctgaaggtaatcgagcattcggatgggtcgactagcggcgacgaggagatggagtactgtcgcacgcgcatgggtggcagcattgcgaggaaatcgccgagggaaatcttgattgagggataacgggtgagaagatccagcgcgctgacgcgcttcttgacgatttcttcggtgaagcggctggggctggaggcgagatagcgcaattcggcctggagttctgcatccgcaattgcggcatcggcgaggacattgagatcgcgcttcgaagcgggttgggatagctcgatgtaggtggataggagctcgaaggcggaaatgggcgtgtcgatggggatcgagggggaagctgttgagcctgagggcttttggattttaatcacggcatcccaggggaggtcgaagcggcggatcgcgcggcggacgattgagcttgggttgacaggtagcacagcgaggtaatcaccacactggtaggtcatgtccgttggcagcttgaacttgaccacgcgtttggctggggctccgggtggcgtaaggagctcgttttcaatgacgaagccctcttcgagctggagacccagtgtggatgcacgcaaacccgagctcacttcgacctgcaaggaagacttcgacttggctgcgttttcaggggtagctccaccgaatttagccatcacggccggccagaatgaggtctcgccccagccgtcgaaatcggtgaacatgtctgagtttgctgcgtcggcaagaccaatctcacaaagctggttagccccgttgtccttggcgatttggtcgatggccttgggaatacggtagaaggtggacgaccaatcatgatggccacagccgaacactgcgtagttgacaccttccaactcgctgcccttcagcccactgatccactggaagaagtgagccgcgttatccggaggctgtccttcataagaagctgagatgaagaccacaggctcgcccttggggatattctgcatggctgagtccaaagaacttgtctgcgcagcgtacccgtaggcagtggcatcatccgccaacctgcgagcgaacgcctcgcaggttcccgtattgctgccatagaacacgtgcattggcttcagcttaccatccgcgtgtgcggcgaccttgggcttgcgatcccggctgccagcgccagtctctgggggcacaacagcagagccgctgagtttaacgctgagttgcgtggggtcaagtccatctctcagggttgccttcatgtggaagtccttgggcttgatggtaagtgtctgcttgatgcggagatcatagctggggttatccatctggaagttaaagttctgcagcaaaatcgcaaccacaaggagagcctcttgccatgcgaacggccgtccaatacagccgcgcatgccgtttccaaatggcttccacgcgttcttgggcagcttgtcgaagttctcatcgagcatccgctctggtctgaactcctcggcgtcggggccgtagaccttggggtcgcgatgcattttggtaagcataatggcgatgacctcatccttattgagcacatatttaccacctccaagtgtaacaggatcttcgtggttcttatcggggtgggcgtgtaaggcaatcattggggctgttggcttcagacgcagcgtctcgcgcatgacagcgttgatgtatggcagcttggacatgtcatcgacggtgatcttgcgtttaccaataacactgtcgacttcctcttgagcctttctgtatgcgctcgggttcttgagaagatagtagaacaggaatgacagcatgccagaggtggtctcgtggcctaagaaagtcagggctgaaatattgcgtccgttggaggattcacttaccagcgatgaggaacgtgatcatgttgtccacaatcgacgcatctgtcatacccttgccagtctgcgggtcccgacccaggataagcgcattgagaagatccttcttgtcaacggggttctccttccgcgcatcgaccaattcctgagataggttgcgcagatactcgatatcactccagtacttgttgttctccgaagtaggcagactgttgagcaaagcagggcgaagactgcgatgtccagaacctaagagcaaaccaaccattgcctcgacaaatgggtgcatttcatcatggtagaacgagttgaagcgagtgcccatagcgcaaagagcaatcgtatccagtgtcaagcgagtgaagtcatccgtaacctggataggaacggtagggccagcccgagcccatttcataaccagttgagttgcaatatcatacatctctgaaagcaagttagccaaactcgttcgtctgcctgcgtgccgcatagctctgacccgacagaaaagggatacccaccatcgaacatcccgcgaatcatcaacggaccaaaggcaggaacaagaatgcgatgggcaaccgcccagttctcttcgccgggatagtttgcggtgaagagaccgtcgttgacaccgttgcgaatctcatgcagaccagcggagaccattttgccgaaacgttcctcatcgcagacttcatctactagctcgtgggagctcacgaatactcgcggtttgccaaagatggttaatcgaaagatggggcctgaaagtgagaagcacaagaattagcccatgatgttcacactatacgtccctgaccgtgcagatctccataccatagttatcggccatctgctcgaagctgttcacaggcacctcggactcgatgtcgtagatgtttcccaagaatgggacacccctggggcccggaatcgggacctctttgactgaagccatggcgtataaagtccgccgttcaattggggagtttgatcaatttcaatagttggtgtcgtgtcacaatttggaatacgtaatgatgtaagggagcaatggcggggtacctggtcgaggtcgtaatccggtcagccgctgtacacttatgtcgaaatgacccttggagctgcagatgcaataggatgaagaattaaaccaagcttgggagattaaatcctgaactcaggaggaattgcaaagggttataaacgaaaaagtgtgacctcaccgactgtcaagcctcggttccttttttagtgtgctcataacagcgttcatcttgcatatgggatcgctgcacaaattacataacttcatttatgttgcaattcatttgtttcatccgcgtcgcaatgcccggatctatgacggggcatcggtcgaagcccaatcacgatcgccgtgtattaatcggccgtgccgagaactcgtccaccgcctgtcggatttgacacgaatcccgaagacacggcattgtataaaggcacatccgcacagccgaatccactatatccacatgcttagactgtttagagagtcgcctcgcgggaatatccctcttgggtcttatctaactgggtccggcccattatcgccccgactctggtgttgggcccacgtcttggctatataagataaaaatgtactccgtttgaatccgtcttgcttccagaatgtagatggtgcaaatactgggtactaataagatactagactgggctactttccactcaccaagatcaaggggtaagagaattgaaagaaagggtttgtatggcaatatatttacatgaatggagaagcatattgcaaagcaaaaggcggcctaaacaacgccaacgaagggaattgggattcaaggatcaaaaggggatatcaacagaatggagcggacgcgagacagaggcaagcgacagtaggaaaaaaacgacggtaagccggaaagccgggacgaaaagaaaagggacattattccggctccttcagcaaccacagatgcccaagattcatgtcatagcgacaatctgtgagaccggacatggcgccgaccgaaaggaagaagaatcacggaactattcattatacaggtccaaacgcaggttcgtggggtcactagtgcggctgacaagccggctagttgtggacctgctgataaccaccgttcaacttccactcgctctgcctccagtctttctggaagttctgcatctcatcgcggttaagaggaaccgggttgttgcctaatgcgttctcgagacggcccttgcggcgctggcgcaggcataagaacagcagcgctgcgataccaatggcaccggcggcggcggcgccaacgtagactccaatgtgagctccctcgccgagatcatcccatttttctgatagagacttggcctcgggcttgttcagttcggtcagtacggtggagtttccgctgttgcatctcattagtgatatcctgattggctctagattgggcacacttactccaccactttgatgctctcccatgaacctgtctggtccccgtaggtgtactccttgccagtgtggaaatccttcacacgcagcttgccaagggtcatagtgaaaggcgcggaatcccagtcgacaaggccaccagcccactcgatagtaccctgcgctgcgcttttctgaccagcaggccagagactgaattggacacggcagggtgtctgtgggtagtttttgccgtacagggtggacttctcggagtattcgagttcgcgaaccatctcgccatcaatccaccattgcaatttatccttcgcccagtaggtggtgtagttatggaactctgtgtccgcgttcggcacatagtgaaatccaccgcgatcgaaggtgctatcgttacccttgccaaagaagttggactgcacttcgctagtgttgtatcccacccattcccaatcaatctcatctagatcgtcggactccaagactacactgctgactagacctccgcccttggccatcttgacgtgagattcgacgacaccgaagaatatatagaaggtcgactgtaggagcgtggactctccttccttggagagagtgaaattggctccgtcgtcaccgtacacgtatgttccggtcgtcatagaccagaccttttcgtccaaggttgtgttgaagtcccatgtgtgttcggtgcccaaggcgggatccgcaggacatgtcttcttcgttgggtcacagtcagtcgatgtttgagcggtggcgtagctagccaaagctgccagaacggcaatgcgggagaggaacatggtgggttgatgtatatagaggattggtcagggttctgctgtgagactgtccaaaaaaaggaatggactcgagactactcgagattcgataaagagtggatgtgcaagtgcacggtaatgagtggaaggcagtctgccagcaagatcctaacagtgtgttgaaggaaggaacatcgagaaacggggggaaatcagccacgacagtccaatttaggcgtcgagtggactcgggacattatgggctagtggtgtcttgggccctgataatttttgtgcaccgttggagaggcgtaaggggaaggctgcagagactatggttgagtttactagctagccggtctaggctaggggttccgtttttgtgcatggcgctagccgtgttaggtcaagctccaggggccctgtgcatgacgtctaacctgtttgggctcgcccagtggtttctgataaaaccacttttaggcgggcgattctgattggctgctgaccatccaccgattggctgtaaaggaccccgataaccttggatcgaacaggcccatggattgccaggtacaatacggagtacgacaacatgtatactccggattctataacaggttgatacattcaacactgtgttgtagtgtgttattttccatttttagccgcagaaatcccttggctcaaacgcagaacaagactggctgtttagctcatgccttggccattcgaggggaaacttctgcaatgaagatcaaacgcccaattgataagaatcgccacggggtaagaccaggattggactacagatggatcatcatgcatgtgccccttgaaaacaacacttcaaaatcataacaacagcgtaacaacaacttatttccagagttcctccagttcctccgacctaccaaactagtattccagcaacctccgctcagggggtccaaaaacaaagccactaagaagccaagtccgccccgtcaatgagtggagatgtctaacagtttttctttttctttttttcttctcccctgtgggccctttcccctgtcttaccttcctacctgcaaacccgctcattatgtacaatgggataatgcactttcccgaacgatcgcctcccactcttattcgtcgaaacggtgagatcacggctgcggcgtttttcgttcgccgttggatggagtctgcttcgctggcgaagagttcccttaggggaaacttcgggagttctgatcgatcgaacgccactgctcggcggtgacaaacagccaagtagccaagtcctactgagccaggccaaggcataataatccctcactacggagtactcaggtacccgtcagcaagtcgtccgactggattacgtggacatccgccacatgtgaatgtgcattacaagggctgaaaaagattctcgccatgcactgggatatagatttggaaggctggcgtctacagcatagatcggattcccaattcaaaacaaagaagcatcacacgcacagaccaaatccttttcaagtatttctcgtcaagtcgtaaaaccgtgcaatcacatgtatgctgtcatgtctcataaccaacattgctccgtcaaacctgtccacccattccttcgagaaagcacccaaaaatagcaaacgccggtcccaatcgatatgttcgagaccaatggccaaatcaattcccccacaccagcaattccacatctctcatgtataatccgcaccttaattcacccctccgtcctataaaccctagccggccggcgcaaatcatcgcgatcgctatatcggcgtgaactgcgtacactagccggcttctcggcataatcgacataagtcgcaggcgggcgacggcgatgtcgccgtccacgggtcttggtgctgctgcgaataaccggggcctggtagacgacctcggacgcatcattcttccacacgccgggaagtcggagtattcgccacagccacaggatcaggagggtccctgcgatcgagccgataacgatacccgcaatcccaccgccggtgattgtgcttgggcagttatcgtcgcttgactgccgggtctcgagcatggagtgtataggagcctagggaagcggagtcattagcttttatgaattccagactctgcgatccgtggttctttgttcggcccgcgcgggtgttactggggtgagccatggaagagagcttcagtaacggatcaccgaggtatgcgcttaccataactgcagcctgtggactatctatttagcaatgcttttgatctgatatcgtgggatttgaggttccagtccctggtggctggcaattgcatgcagtactccgtacagtgggtctcgatgcgatcttgactccagcacccgaaaaaaaaacgtgggtatgaatgagacgaaatcacccatgcagcagatgagaaagggaaaaagggaaacccagcgcaagagcctcaagtcttattcaacccagaatctcacatttcccctcttgactgcgcacccccaacctcctcttatcccgcttctgacgtcaagcggctgtcggtcttggcggctggaaagagcagcgatcttctctttcgcacagcacaaacttggaatttagttgcagtcggttcttgtttgatgccatgattggctgctgaccttcatcgttcttgtaataaaccgtcccggtgaaagttctttacaaaacatactgaccctcggaggcgagacccatatgaaacaggtcacccacatggaacattctttctacattttacaactttactatgatcctctgccacaccaccaaccatgcctaaaacaaataaggatatagagcagcagatccagctggccatggactctctctcagaccaatccaagcctaatattcggaagactgcacgagaattcgcggttcccgaaggccgccttcgtcggcgctggagaggtggaaaatcgctttttgaacgacaacccaatggtcggaagctcaattctacacaggagaaggctttatgtgcaatcattgcttcctttcatgcggtcggatcatcaataactcgtcgacaaataactgacgctgccgatttaattctgaaggatggccacaacgaccctaccacagaacccccaagaatcggcgaccactggctaaaacgtttcctgaaacgtaatcctaatctgtttgctactgaattagagtcatccaatccacatgatgataatccaccccggccggataccccgtcagtcagctctgaagacaccgagtttagcactccaaaaaccgccgaggaaattcgaagaataagcgatcgtctcaatcgaaccgacccaaatactcagcgcttcaaagacgggctagcaaagcttgcaaagggtgctgaggcccaggctactttggctcttcagctacagcgggaactcgatcgtacacatgctattatgggggcacgcaacgcccggtatgacgctcctcgccggaatatcccaattgctggtatcatcaattcatcctaggtcaaataaatgaagcgaaaagagtatgaattgaacgagacagccgatcaagaaaaaatgaagcggaagtggaagaaggtcttgatcgagattaggaagcgcggaaaggccaaaaaacgtgggaattaattctgtcttgtattctagtagtaattggttaatgaacacagttctttaattagatcatttcattgactacgaggtggtgtagtagatggtacttgtagtaaaaagtaaacaaaatgttccatatgggtgatctgttctcgctcgccagggtccgtatgttttgtaaagaaatttcaagagccgatctaaattggggatatcgtgccgacctgccggagtccccagcattgcagcaaacccacatgcatttgcctagatatgcatgtcacaccatgaagagtcttgtcttgttagtctgacatgcggggaaggaaatcaacggacgattcgggccatgtcgtaaataaatgcccagaaacagccctagagcctaaataacgagttgcccttgtagtatacttggttcctgtgttctatcgtaagtagctcaaacaggctcaagcctgaaacactatccagccactctaataatacgcccgaagacctaataatccttgtccaaccacacgtgtccgggagatggcggaacctgcccttcgcaagctcatatacatatcgtgccaccattcgtcaagacattatcgtgttggagccggtttcacccaatgcttaccattacctcaagaatccgcacgttgtacccgctctcattcgcatggacagtttcaaggatacgacctagaaacagcgactcgggcgccatgaactcctagctctacccgatcacacaacccgtatattctcttgtcttctctcatcgtcgtggttccgggatctcagaatgacgatcaatcgatatgtatgtataagacatgcatctccgtaaccgggttagaattgtcagcaagggcctagatacatagtagggttgttgatattctacgtagttgcaaagataaaatttatcgttcggctttcggctgtaaagtaagccttgcatggtctctctctgctcctttcatgcatagctgaaaactcctggtccaaattatccccttgatctgaataccgtactactactagcagataaatgactataccatatatcgccaatcatacgataccagattggattgactatagcatttcttgaacagaatgaggcctattttctagaatatagagtaagtagcatgtcgtcccctcgtcttctaattggcgcgtacgcatagtaagatttattttctgaattatctcgcagcacctctggtataggcgaagagatcatgcgctatggtgtaacatattacaaactcgaagcccgctatcttgaccatgaaagaatatatatcagcaccaacgtagctgttgatattcatttctatgggctcaccatccttcatggtagaagaacttctatcacaccgctggcccctgggtgtgcgtaccgaccaggcttcggaatttgcgattggtttcaactagttcttgtcaaactgatcatggctggggtggcagcgaagcatttaatcggtttgaaaccgcggaacttcaaggtacccaagaccatactgaactctacaaactttcaacattcgtgttcacgacaaattgacctcaaaccagatggagcatcgatcattgatatagagtcactaatcgatgccaatcgaacgagggacatggataaattgagagccaatagcacggagctataccaatcgagcgaagatgggctctcgatctattcgctcactgtgcgtggtttcaacttccaggaaacttttttcgagtcttctgatacataagccagcacccctcgagttgctacgaggtcatctttattgactatataagcagatacatctacggatgcgagtctttgtaataaagatgagagctttgggccggtgttgatatgtacagttggccaggttggttatgcaatggaggccaaccctccctcctcaccaataatcatatcataattatatgagggcccacccccctcctcttcctcctatactccccacgacagcacctcctggctcaaattccctggcccgcttatactacagtgccatcgggacccgcttggtcttgattgccatcagggcccgcttctccttgagggccattggcattggcagcgatcccagcagcgagctcgacagcgcgatcatccgcctttctatagcagctgtatcaaagaaccaaagatcagcatattattcctacatatcccacacaacgaccaagtgacataccgcttggtacagaacttgatccactaagatgtcaagaggactacctggcgtaagaccggggcaagcgtcacaacccctacgacttttaagccgaaagaaagtcccttctcgtccacgagttggacgaggtcggccgcttcgcccgcgcggggttggagaggcactggggctagaaaaaagggttagaaagaggccaaaaaagatgccaagaaagagatcaaatttacaagcccaggccacggtaaaaaaagacaacaaaaaaaggcttaaaagagacattttgttcatggatgtgtatgttttgaattgatatgaacgtgaagttcttacatggactacgaaattggtttattgactacagggcaagcaatggcttctaggaaggtacgaggctgcaatttctcattgggaaggtacgagcctccttagtcgggtacattcatcaagatacagcaatgatatagtgggcaagatgcaatatccataaattgaagcgaatgaaccagatgagttaatccctctttgttgccgaatccgtgtcttttgccatctgcccatagctcggtggcgcgtcaatcatatcaaacgggctgtcatagctatcaccgacaagcccccatattgagactcgcgtgatccggtgcttggtgagtttgctcacgtcttcacggcgttgttctttcaacaatctcctatcttcttcggggacgtcaaagcctcgagctcgccgacaacatccacattcgagagtacaatgtccaactccaagcctccgcgtaggatcgatcttacggtcaagacaacagccacatccacgagcacagcatccttgtcggccagcacaatcttcaacgaggacgcgatgcatataccatttaggatgggaccgccatagctcaaacgcatttcgctcatacccatcttccagacaggaatgataatgccaccacatttgctccaagagccagtatttagcattcaaaatatcaagcctctctttggcatctttgagcgagtcaagcccctcctcaatagatatctcttcttgaacaacttcccggagatcttcctctgtaaagagaagcttatgtgagataaaaccaggcctgcaggtggcattagggctgtttgcttcccagtatcgatgcaagcgatatctttggagaatattgatatccccatctcgttcgagacgctcttcccaaaagagtttatcacctttcaagaaagtccccactgttctggatacttgctcacggctcgattttatttcaggggaggattctgttttcgcagatgattctatcttcccagaggattccgtcttcccagaggattccgtcttctcagaggatttccttctgggacgggacaataaaaacagcatctttgatgtttgagtgaattcgagtacaaaggatgattgctcggactcatgaaattcatccacagtgctgtcagcttatacctccgacacctaaaaggttgggtgatgacttaatcttttcacaatagaagctcgcttaattagatccgatcccaaagtgattcactttgggatttaggtttccgatctagcaaattcccgaaggctctagaaagttgctcttgtctttggccaagactaggttaggtgtactccgatggttccgtttgactttgtcgcagggaaggggggtatcctgttacagtgagtggtcataggcgcgaataccgtcgatagtggccctccaggagtcgggaaccctcgacagttgaagccgcagcagattatctcaatatagcccacaagcttggtgtgtagcgtcgtttccggcccaaccgcttgccttcatatgttcctggttctgctgaaatcttactgggcagaatatcgttattgaattaccggaggtagatatatatagattgatgggtttatgtaaagaccaatccagtgctataacaccagtaagggtggacaatatatgcacagatgtactcaagttctgattttcaaagtgcacgagcatgaatgtaaaaggaaaatatccaaaactccccgacccatgatatcatcgagaaaaaaaacagcatacaaccctattcatccacgcaggaggccgaaaagtcaaaataacaacgcggtatttcatctccagtcattatcgacccgtgatataatctcggttctcgatcgtcacactcttggtcatgtggttaaccttatagacaccgacaagtcgggcagcaagctcaaactagacaacatgttagctatgtcaacttgaagcggtcatcaacggcacgtaccatattgtttctcaatgaaatgacaatgaattgggcatttttcgttcgttccttgatatacgaggcgacgatggaaaccttagaacaagagttagcatacgtgtccatcataattcgtataagatcaactcacgtttcggaagtccagggcagcatcgatctcgtccatgacatagagcggagtaggcttgtagtggtgaagagcgaataccagcgccaaactggacagggtcttctctccaccagacaagttgctaatgttcttccagctcttcttaggaggcattaccgagaacaagatgccttccgagaaggggtccaatgagtcgaccagctccaactcggcgttaccgcccatggtgatcatctggtacatttctttgaggcgcaaagagataatgccaaatccttccatgaatccattcaagcgagaagatcgaagaccgtccaggcgtgccttggcaccgtctcgggatgtcaaagcgttggtcagatcggccgagcgtgattcgtgctcggcagctcggcggcggtactcctcaatgactgacaaatcgatagaggcgttttgaactttctcctccaaagcagcaatgacagctttcagggaatccttgttcatggcctctagctcatccttggtgtacatttgaagctcagtaggctcctgctcttcgccaatatcgctaatgttctggacggtcagctttgaaagcttctcctcccagtaacgactgcgtttttggttctcagccagggctttctggttctcttccaatttatttcgcatctcgatttcagcagctcttgtctcattgagctcagccacctttgcgtcaagctcgtccttcatggccttcagctcgccctttttagactccaatgcctaatgatggtcagcagcaaattcaatacactcgcggatcttgggtaaattacctcctgggcttcgtcggccttctgtctccagtcggcagattcattggtctggttggcaacagcttcttctagtttttccaactcctctgcgatctgaccaatctccttctctgagatatcgcgggctttggagtgcttcttgatgagtttgtcgttcttggacagccgcccctccgcgtttgaaatctcctcagcaagcatgccaatctgctctttcaggccatctaccttcgccttttgaccgcgaagccgaacaccaccgacctccatgatcttgctctgcaaggtctggatctcttcctcaatgccactcttctcttcattgagttgagcgatctgcttttgggctttggcaatctgtttttcgagggcagcaacctgggcttcatctaaatcagatggctggtgctgtgcgcccagctctttcacgcgtcgctgggcatcagcaaggctacgcttggtgctgtcaatttcgatcataatcttttggatcttagtctctaagcgtgggatttcctccgatctttccttcatctgagactccacgtgtcgctgcttttcctggaaagcctggaatttcctttccagttcctcgagatcggattccaagcgggatacctgctcctttgtggtgtctgcgacttgctttgaggacataccgcctcgggcaacacgggtaccaccaccgctcattgttcctgacacatcaatcaactggccatcttctgtcactactcgccaccggcgagcaccataggcaatacgattcgcctgctccaagtccttagcaaccagcgtgttttgcatcacactatagaaagctggggcgaacttgggatctttcggcttgacaagatcaaagagacgaggaacgctttcaggtgtgtagatcgatgccatgtcgcggcgaggaagacggtcaagaagaatgaagttcgctcgaccaaggttgttcttgcgcaaataatcgatgcattgctggccgacttccacggtctccaccaccatgttatcgagagcaggacaagctgtagaaatagccacatcgtacttctcgtcaattgtgcctagattaccaagtcggccatggaaaccatcgatacggccagattccttgagacgcatcaacccagtcaagacgcttccacggttttgtgtgcttgcgagactgactcgtgcctcgtctgctttctgacgggcactagagacgtgcgaacgaacctcgggctcccgaccagcgtatttcttcaagtcgtgtttgagcttctccacttcagactccaaggtctctttttgagcttgtcgctcttcgagttcgttttgtttggcttgcagactctcttcgatggtaacaaccttgccctgtgcttcttcgaggaggacagcgcccgcattaccacgctctcgcaagatatctagctcactctgagctactgcaactgcggactgtttctcgttgatcttcgcgttccatggctccagagacttttgcttctcggcaatctggtcagataggccttgcgtcttgccttttagcccctcgcggatggaattcagttccttctcttctgtcaccatctccttctcgaattgagtggtttcggcagtcttcttctcaatgtcgtaggtaaacttctcaaccaggctctggcattcagaagcagcaaggcggctggtctgcatggctttctctaactttttctgtttgccgagcaagaatttcttcttctcctcaaacttgacagactccttgtcgtacttggccatctccttgagcaaggcttgagtctccttctccatcgactcgtaatggcgaacccccttcttgtaggctttttcgagctctttgataccggattcgtttccttcgtgtttctcgagttccatgttgagtagctcctgcatttggagaatggcctcttccgtaacacgaacgttatcattgcactcgtcaatgtaaatttgatatagcgctgattgtttctgtgccaattcgttctcctcacgtatgtaagccaacgctttgtttttcttatcctccaaggccgtcttctccttctccacgtgctggacacggttgttcttctccacgcatacgtcgttgagagcttcgagctctgttgccgcttcatcgataggtgtcttgtacttggaggttccaataatatcttccaggtattctaagaggccttcgtcgtgttcgttggaggctttgggtttcatctgagcgatcgactcgacctcaccctgcaaaatcaggaaccgcttgtggtcgagatcaattccgcgatcgcggaggaaggccgtcacagcggtgaaattggtttctttcttgttcatgtaatatttgctggtgttattcttgaacgctcgtcgcgaaacaatcagttgggaatctgggaccacttcctggccaccttcgggcaaatcgaggacttgtgagaaatgaacctcgacttcacaaaatgcaaggttgggatactgagcagagttatgaatcagcgcagagattttgccctgtcgcatcttgctggcgcggaaaccaaatacaaacaggagggagtcaatcacgttggactttccggatccgttcggtcctacgacagatgaaaaggaggcgtggaacggtccaacgatctgctgcccagcgtaactcttgaagtttgtcagaataaggttctcaataatcattcggggcttgggcgccgcgggctcctcgggcgcttgaggggcctgcgttctagacttggccacaatgtccataggcctctccaagactgtcgagttcgggtttataatggaaatttgagatgtgggcacttccaattgtctcgatggcgactgattcacggcagattcggtgatgtcggacaacggtggcacgcttgctcggtgcgctctttcacgaggctctggcgattgggatggctctggagttggaagtgagccctgtgccggcttgagtgtgattgagccgtgactcttgcggggatgagccatactttttcttttcaacgccgctttactggaaggagattctggatctacttccattgacgccatcctaactccctcgtcattctcatcattttcttcgtctatatccatcgcatcaatgtccatcgcgtcggtgtcggtgtccatcgcatcggaatcatctgttggcgcttcttgggtcttgctagcagcgcgcacagtagaaggtgtgacggggtctattgtcattctcttgctcgatgctctctttgcttttttagggactggagtgtactcctcctcgacctcgtcatcgtcatcgtcatcgtgcgtattgggtgttggtgttacatttccggggtcttctgattcagatgtatcttcaatgacataactccgacggggcgcagagcggcgcgaagccctgccctttacgactgaagccattttgtgcagatcagtgggatgtctgctgcatggagaggggcgatagtgttgtgcggaggttttgtcagttcaaagtgggttgtttacctcgtgcccaaacgggtaaagtgtccgctgttctgccacaacaagcccttcaccgccatgtcccgctgtaatttaccgtacggtaattactcctccgcggagcttcatggggatcagcttgggaattgttcacacaaaccatcacttctctcattatgcccagcatggctccatgggagagcttcgaccaagccttctcatttaataagaaatattcatatgagccaaaggtttttgaccagattctatccaaccggcgctcgttggaccagctctttgccgatcgactcttgggactcgtcggcatccaaggaggtattgtgacttgaagctctacgcttgaagcctcgggctaatcaattacctctctatagtgaccaagatctacccgccgaggaccaactcagatctccgaacactgttcggccacatcgtttcctcggacctcgatatccatcacaaacagtccttgatctattacatcctgaaggactgccgcactgcgccagaagcttcgtctcagtttgcgcaacaatgccacctgccagagaagtaccgtttcttcatcgaaggtctttggcatttggatagactcgatttcagggtgagttgtgaaccatcttgagggcggtcatcttctgacaattccatgatataatagcgcgcagtggagcatctgactgaaccctcgctcattcctacctttcccgatgagattctctacgttcttaccctcacaaagcttcccaagcatgatgacagcctcgcaatcgcctactacctcactgcggctcctcctcttgcaagcacaaagatccgcaaagctttcttcgatacactcgcccgagcaaacctcaccgaggcattctacttcacgcgcaaatacgacgacactcttcgtcagagcttttttgagcagttggtggaatttgttcacaaggccacccctggccaaaccagaagtagacgtgcgatggaactcgtcggtcttccacttgatgaagatgaagaacagtggtttgagcacgtattactgcagggcaacgctagtacccttcctggagctaaggatactgtgatgatgcgacgccttgcaactgggcgaactgggcaactcaacccggagcttgaatccttgggtggcaaaaaggtcgatgggttgaattgggatgaccttcgggggagcatacgacacacgtagatgatatacccaaccagtgatctatactggattcaatgtttattggttactcaaaaatgaaatagcaatcagctttaatagttttaatggctctgaatgattttctaatggtattttgttttctgtcggttctgtgctaatatatacaactctttgttgatgagattgcatccactatatgagctggattgaacttctatatctcaactccttttaatctcattccgaggcaaagaataaagcaataaaaatccaatctcatactctcaaacattaaagaatcgtgctatacaagagtgctgtgagtattttgtaggcgttccgataagatacggaccaattccgcgaaaagtcctaaccacaggagttcagtgtttttctcttcgcgacaaccaaaccctattcttgattttctctcaaattgcttgatcacatatcgaaggatacggattaatccgagagaagccgttgagatacaggccttgctttggaggggagcagttgagcaaccaccgaaaccgcgaagatggtggtatgcaacttttttcagcagggtcgctgcaagtttggaggtatgaatctcttgtgtgtagagaaatcaaggcactaatatatctgaagatcgctgcaagtttgagcaccctggcaaaccgactgctggtccatcggggaatcgattcggggctttatcaggaggatttggaggtacgttcaattggattgttcttattcagcgttgctcgatgcggagagtccatttattggacatatattgtgtcgtgagattgattgttcgatctcgatgttcatttgttccccccatctctttctcttgctcttacccttctacccctgctgggcttaccccaaactccttcgagtccgaagtgcaacgaatgtttccctgttcaaaactatgatcaatcctgtgaaccacatgcccccccttcgggctagtcttcttccaaaccctaacgacaaaattacgacaggtcaaaaccagactcaacaagtagccgagtaagtcgcatccccagcgccttcagtggattcaaactgacaacaggcagcccagtagtgaaggcaagcgaaatcaagcaagatttgaccgctggccagggccgtccggaatggatcttctccgcatatgcgccccacagagatgttgcgcgccagctgttcggcggagctcaccgcgaacgcagcatggaagagatgcgcttgcgccattatgaattagcagcagccggtaacctgaatgaagcggtccaagaagcctcgtctctgtggcaagaatgcgtgcaacagatggaaatctcactgaatgacctgaatggtgccgtcaaatatatcgttgacggcaagaatgaacatcctaatcgactggacattatcgagggaaagacccagactgttaaccaagctccagcaccatttggccaaccctctccattcggccaggccgcgcctacacccagcattggtcctgcacctggagcgttcggtgctccttcctcgacatttggccagccatcaggagttgggcagtcagtcggattcggtagggcttcagcaccagcgcaaccgtctggcttcggacagaattctgccttgggtagctcagccttcggccaaacctccatcttgggaggtcagtctgctttcggcaaaacacctttcggccagccagctcttgctcagccaggagttaacccaagcccattcggtaagccgtcagctctgggaggcgcggccccattcggggctccatctgccgcttcacctttcacccaagtagctcagaaccagcctgctggtggtgggtttggccagagcgccggacaacctgctccgtcgcctttcggtccaaccgctggacaatctggcccgtctccatttggccagccagctgccaacacgagcccatttggtcaaccctcagccccggcaggcgctgctccattcggtcaaccttcagccccgacaggcactacgccattcggccaaccgtcagctccggcagccgccgccccatttggtgtttcatctgccccttctcccttcactcaggtaccccagaatcagcctgctgcgggtgggtttggccagagtgctgtacaacctgctccgtctcccttcggccagcctgcagttcaaggcgtgccggtgcagagtaccaacgccggccctcgtgcatacatcaaaatcgaaaaccctcaagacctcaaccctcttccacaactggagggcgaaactcgacataacccatccactaaacaactagtgatgtggaagggccgccctgtcaagtatatcaacgagcatccgtgctaccttcacccgcaagacaacatcacctttgtccggatcaacttccctaacgggccacctgatgctgctggtttgaaagacgcacacggaaagcccgaggaatacacaccagaagtcgttgaggcatatcagtttttccttcagaatggctacttcaaggacggcaacattcccgcagtacctcccaagcaggagtggctcagtttcgacttttaatccccggagagagcattttcttgtccttcattttattgttattcctatcacgcgtctcatgggttgagatgacgtttaagcaacatgttccgggcgtgcggaacattgggactggcgcttaggagctcaacaatcaatttatgcatgtagcaattcgaagtgctttaatttcactttcaacgcacaaatttacggtctaggaccactaatgagactctttctttgtttcaagatgtttccattttttattttttaaattccaggttcgaacggaatcccccgcagcgcgaaacaagtcatgcgggccagaactagctccaaagtcgtgccgtgcactccaaattggccagtccacgatccctccccgaggcaagcccagcctagcgcatttatgcggcaatggtgacctcaacctcaacaccggcctcgatgttgatgatgatctgcttgacggtctcggtgggggcgagaagacttaagtagaatgtcagtaactgcatctgctatagcacggcgatactgccacaactgaatgggcgggaaatactcactcgatgagacgcttgtggatgcgcatctcgaacttgtcccaggtcttggaaccctcaccgttgggggtcttacgggtggagatctggagggtcttggtgggaagacggacggggcccttaacctggagggacttggagcgggcacggtcgatcagctcctggcagaccttctcgagggaggcaaccttgcgggaggtgagggtgatgcggatcttgtggaccttctgtagagcggagaagcaattagtacatagtttgcactggcgaggtctatggacacattgcacaaagcgacagctacatcagggtgtagcagcgattgcgacagtgaccattggatcaggaacaacgtacagggccctcgccgaaatccttctcgggcttctggaaagacatcttgaatttgtatggactgaaacgggttagtaagtcgattagggaatttcaagagcagaaaaaagggagcgcgcacaatttaaaaggcgattgccgtcaagacctgaactactaggctcggtaaagtgatgatggctgttggagtgatgtggatcgagaattccatatccaaaatgttcagtgcgaaagtcttggcgcttcggctatcgcacgctaaacccctttaggtcccctttcagtagttgcttatgtcatcaccaaaagaggacaagagactgccaagtgatggcattcgaggtgatgatcagggctgacaggtggctacgcgtttttcctttgttcttgcttttctcccccttgtattactctcatattcccagtcataaccaccttagatcgccccaatggcggagtttccggtgctggctccagtgccatcccccgcagtgcggaggacaatcccatcaaatgactgggaatcttgtctagatgcatggatggccctgttggggattcgcctgaatgcatcagatcaacaatttaaggttgtagcagctgaagatccatcaatacccccattcctgggatcttactaccaatatacggctgcgggggattctagtctacaaagtggacctaaagctcgacagcttcggaagctgtgctttctggcgacaagaagatacatactcgatctctccaatccaccagatggaattctggactggaggtttctcggcaatctatgttgctgttacccttctagcgcggccctgaagacgtcattatcaagtgcctgggatctgcaccagggcaagatcacttccagtatggagagagcaaaagcagttgtgattaagaacctctcttcggccaactcatcgtcaaaccctgaagtaatttctgacatccgccgtctgaccatccttgcttcagtgctgccagcgtgtggccaggagctcatggcaggctccgacttcctggatacgatatcggaagcctaccaggcaagaggtgcccgggaggagtttcgtaagattctcgttgctaatatctacgtcgggctcgtttccttattgaaggagccagtcaatttgtcttcgttattggatcagctgttcagcctcaaagccgctgctcgagtgggagcgccaaaaatgaagagggaagcaactctactttctgatctcatctgcagctcggacttgcttattcggctggacaagtatctgagcattcacccccagaaacggggacaagatcttcttgccagcttgcgcacctatcaggtggaatcgaagtcactacaccatcggtatcaaagacgcaagaaagtggacaaaggaaaagaagtatcctcgcatccgatcgtttcaggggaacttcacgcacacaagatgtcactagtcactcaagtacaagacctcttccctgatcttggctcgggctttgttgtacggctactggactgctacaatgacaacccggaaaccatcgtcgcccacctcctcgacgactcacttcctgttgagctccagtctctagatcgatctgagcaactacctcccacagcagaacctcaccatagccatatgtcaccccacccaacaccacccgaatcgcctacgttggcaccactaccagcccgcaagaatatcttcgacgaagacgtggacatcgccgaactaagccgctctggcgaggcgcaaggaaaattgtacttcggccgcgccgacccagaccaaacagccgacataatcctctcagaccacagcaaacacgccgcaaacaaagcagcgatcctctccgcgctcgcaacattcgactcagacgacgacgagcgcgacgacacctacgacacagccgacgtaggcggcgccatcgacggagccacaggtggggcagacggcgaagccgatccagccgagcgcaaccgccgtgcagccgataccgaaacaattctcttccgaacatacaagtccaatccagggctcttcgcccgcgactcggcgacccgccgctcccagccgcgcggatcgttgaagcgcgagaccgaaatgactgacgaggctatcgagggctgggctctcatgctaacgcgtgatcccaagcgtctcgcgaaactcgaagaccggctggcgatggatgctggcgcgttggctggtgctggatcacttaaccagcctgagttgcgtcctacgtcttacaggaggccacagcctcgtgagaatggagacgagggttctgatgagggcgagtcttctggccatgctggttcgcggggtggtagaggaggtggtggccgtggtggtcgggcgcggggtggcggcggtcgtggcggtcgtggccgtggtggtggtccttcgtctggtggccaagggcagccagatactacggtgtcgagacagaggaaggaagagaataagagtagtcgggcgaatcataaccgccgacagcagcacgcgaaaaagatggcgcgtggcggtgggttgcctggctaatcacacgaagggatcaagctggcttgtatggatgcaatgcggcataaccgccttggtcattctctatttttgatatctagtaatgactgtgcatgtaatttacataacatctgttgggcttctatagaagagccacgacgcattgaaacagaacgcattcaagtaattcattaatatacctcaacaaatatagaatgcggtatagacagtcatcataacatgttcgcacagggaactcacttggccagcaaggaactgacgcttcgtatcagtggtgatctgagaaggctccgccttcggtaatggacttgcggcactcctccatgaggcggacctgtttcgcgacgtcaccaagccggctgataacctccttgttaccatcatagaaggtaaagatagcataggggataccagtatcgcggcagaactcgatgacaaacttctgcgtacgacgtaggttgtgacgcggaatccgcgggtagagatggtgaatggcttggaattgcaagccaccgtggaagaaatccagccatgttgggcagtcgacgtccatagtggtacggagcatcttctgcgcgaaggactcaccgactcctaggtcggcggttgacatagcgaagtgggataaggtgatttgaacgtgtagtggtgaggaaacaatatgtgagacgaggaggaagatgatgcggctgcttgcatcgggaagcgtcttgtacatcacaccgtagccaaaccaggtccaaaagaagacctgtccgaccagctcaaaccaaacatgccaccaagcagggcctcttctaggagcttggcccttgagtaggtactcccaactcaagacatacagattgaaccgagcgagcatcataatagggtagtaagagtagttctggaatttgagcagaaaccgagccggggcatcgaaagtcatgattcgatcgtaataggtactccgtaggctcgtgaggaagcggtgcgagatagcgaagaatgggatatgctcgatatccgggtcatgctctggctcattggtcacgatgtgatgaacgttgtggcttcgtttccaccacccgagacttaatcctccgagatagtctgcgatgaatattccaataagggtatccacatggaaattgtgtgtaatgcccatatgaccagcatcatgggcggtgaaaacaagctgatgccagaaacagccgaggaagaatgccgaggtcgcccaccatcccatgcggaggaacatataggaaagaccggcaaaaagggtataccgacaacattcaacgaagtaacaagagtagtcgcagtcgtaaagtccctcggccttgatacgctcgttcagttcgcggtattttcgtttgatctcttcctgacttgcggtatccaaggaggggtatttggcagtgtccaagacgatttcctcccgtgttctcgcatccaagaaggcaggcttggcttgaggttggtcggtcaaagcagatccggccgctttccgttgacgaactgtggatttcgagtcgaccgcatcgaatatcggcgagggaggaactgatccatcttggctggagccactggagcattcttgtgctgttgaatcctcatcactcgcgcacgtgtcttcggcataagcacggaacgtgccgccctggatcgggggtcggaaattgatccatgtcccttcaattcgtccaatctggtacgagtgcatgcgcttgcgggcttcttcggagtgtagcctatacgaggccggtgtcaattagactgatcaaaggtggtggtgtttgccgttccaaaacatacgcgttgatctcatctgtcgcatccctgcccaccatgtgcttgattggcttctcccctccgggatgatatctgatgaatgggtctaccttcaggacacggccctcgaagattatgacatgcttgccctcagctatcaggccttcaatatatcgtcgagtcaagagggtatccttccgggacggtcgggatgcggtcttctccatagtatgcggtgcggtgagaggatggatgtgtgtagggtcagataacatggggttacagtgacattgctgagagtcgaactaagcaactcaccaaaagcatgcaaaatgcaaataaacaaaggaaacaagaatgagattgaaaaaaggcagaaacattccaagggctatggggcggaggtggataacagcggggacccgatcagcgtgcgtgattgtcacaccttcacattaccaacataccgaggcacgtaactttttgacatggcagtgagtctcgaaataaattggtgttggctacattgctctaatcattctatacctatagcaatcaatttcctccttgactgagcaatggcttcattgggaccaggtcaatatgattcatgtttcatctcgtggcatgatcccgctgactcgggtatataggatcatacaactcgcgtggaaatagaacaacttcgggactctaacgccactgatgagctggaaaagcgccttcgaaatcgtacgtccttctatgttgatcctcggcgcgtatctaattcgtgtatacatctaggcattgagttcggaacagctggtctccgaggccgcatggccgcggggttctcctgcatgaactcgttgatagtcatacaagcctcccaggggctggccaagttcgttcgagacaagcgtcctgagatcgcttcgaagggcgtggtcattggacatgatgcgcgtcacaattctgcgaaattcgctgcactcgcagctaacgctttcgtcgcacaacgcatccctgtttggtttttcaatgtggaaggaccaacacccatggtagcgttcggcgtgaaccatttcggtacggccgcaggtattatggtgacggcgagccacgtaggtctaccccgaaactacttttatcgatggattggctaatcggctcgaagaatccaccccaggacaatggtatgttacccatttctgatgctgtaaaataattgctgactgttttataggctacaaagtgtaagaactatgaatgtatatcatggagactgctgacaagatctgccttgtagctactcgagcaatggtgcccagatcaaccgacccgaagacggcgagatagcacagtcaattcaagaaaatctcgagccatggccgaccgcatgggcggaattacagccaggcgaattcctgcacgcggattcctatcagaaattgctgcctcactacagtagccgagtcgcagagttcacggtacgttgtgggctgtgcttcaggagatcaatctaacgagtttactctagaaatctacggtgaccaattggcagcccccaagaccgttcgtttatacacctctgcacggcgtcggaggtttggttcttccaactttgtgtcactcacttggaatcaatgactttgtatccgttgctgcccaggaaaagccagatcctgaattccccactgtgaagttccccaatcctgaagaggctggagctttggatcttgctatcgagactgccgaccgagaaggaaagaccttgatcatcgcaaatgaccccgatgccgaccgtttcgccgtggcggagaaagtggagtgagcctcgatttctgactaccgtcaattgatctgaactaacatgtttccagtgggaaatggcacactctaactggaaatcacgtcggtgtacttctagcgtcccatatcttggattcgttcgatgccagcaaagattggtcccacatcgcggtgttgactacaacggtgtcgagcgggatgcttggaaagatggcagctgcaaagggaattcacttcgcagaaaccctgactgggttcaagtggatggctaatatcgcccgggacttggagaaagagggaaagaccattccttttgcatacgaggaggcactgggatacatgttcccagctgtctgttatgacaaagacggcattacagcagctaccgtcttccttgcagcggaggcgaaatggagagcccagggattgactgcatatgcgaaactgcagcaattgttcggcgaattcggccatcacgagaccttgaataactacttccgatcacccaatccacagctcacttcaacattgttccagggtatcagaggcagcccgggcctcgccaatatgcagtttggccccttcaagattttacgatggagggatttgacccagggctatgactccagcacccctgataacaagccggacttacctgaagatccaacaagccagatgattacgctgtggttggagggcggggtacgcttcacatttcgaggttcgggcacggagcccaaggtcaagtgtacgttttcccactctctttcgagcgaaccaattactgatatatggacacagtttatatcgagagttgtggagactctcgcgaagacgctgtcaaagcagtctgcgatgcattcctcacgattcggaaagaatgggtacagcgctttacgccctcgatgacatacagcaagcaactttcgacatcgtctggtaacattctgaccgttgaatgaagacgtgcgtcagatcaataattggctgagattctcgaatgaccggcaggttacctgatgtagccaaggcgcccgccgcgttcgcaatgcagagaaatgtggtcaatatattgtgaacgagtgtaaagatggcaattgaactactgtgactagagagatcgactgcctccctttcatatatgtacaaagggtcatagcgagtgtattctctaatttacttccctccgtgatgctgatattagcttcgaaggaactcctgtgtctaggggagctgagcgaaaggatttgaggcctatgcacaaattcttgactctcatctccgcgatcaccagcggaatgatctagagtggatcaagtcgggcaaatcaaaggcggcgtgcaagtgggcagtgactctcctggctcaatttctgctatcatctgcacctcagtgtcatccgcttgtgcttcagtgccatcgggaccggcagtacagaggtcgattgcaaaagttctgtcacactcattttcacggtagtataaatttactcctaatacaatgaggttgtttcaaactgctgtttcgattccgttccaatttgattaaatacaacatacattatgtagtttaataaagcaaccaactaccttccgccttctaaagcaaaaataaagttgatacagaacttttgaagtcgacctccggccatcacgacaaccggcctaatcgtttattaccgccttggttatgtggggctcactgcgtactccgtatacttcgaagtatgaagctattcagagaccacctgatctgtcaatatgaaacaatttaaattattggaatcatgaatggaattgctgctcgtaccccccaggatgacaccggcctaaattttcagtaccgttttcctaagttggttgagtacctagatctatataccagtcgaacaatccgagggcctttcagccttcgtgaatttgtccgagaactccgggagaatgagagccccttgaatattgttggtgctgtacatgtcgccgaactgaatcccttcttttgattcatatcgctttcgtgagtaggctctgtagatcgagccggacatttcgtagactacggtggttctttggattgcgaagtcatcttcaggacctccaaaatcttcggagtattcgagaatatacattttgaagggggccacgcatcaagcaagagaaaaaaaaagcaaggtcgattcaggtaggtaaccggtctgggagtcacaagatgaagcgggtgccgacctagttgcgattaaaagggctgtttgcactttctcgtcagccaaggcttgtgagaggagtcaggaggagcatccaaattgggattcctccttcaaggccaaatatatctctcgatcttgggcgtatcctcaagtctctttattcatacatcaacatgcatcatcatatgtctcgacagagcaaggcgaggaggaatattatcccacaatgccatctaacagaaacccaacaaaacaccgactgctatgatcatcatcacctgtgtcacgtccaacaacctacgccctgctcaagagaccatcacctccatctgaacaacaccgatattgataccgttaaacatcgggcatatcacttacgtcaagccccaagtaccaaagagacaattcattgttatttttgtcctaacttccaaggtcagggtcctcgcctcagaatgtaagactggatttgcacttgtgttgcgtcggtatttcttcacctctgaacgaattgcaggaacaacgtcgattccgacccccttgtacagcaccatgagatctgccataaccgacataaaagccaacatatccacccgcagtcccggtctcgatcttccgagtcgagtgaagacgaagaacaccgctaccacaccgagcattaccatactcaagggatccagtccaatgagcgacaacatcatccacctacagtcaagcacgtccactcaaaaagttcgaatagcatgtttgaccatggccatcatcacgctgcaacaccagcacaaagtacttgtgctcatgctaccgtgtttaattcacatgatgacggatgcggtagcaatatgaaagccgttagattcgaagaagatgacaggcctgagactcaccattctgattgtcccatacatggtaccccgtcccatggagaagaccggtatggtcctcatcgcaattcccgtcaataccagtcccaatgtcgagaatcgagaacttacaggtgggtttggggccctcctttacccgtggtggcccctcgacgtgaaaagacttattatgcggagagatattgagaaatcgtcatagataaattgaatgcgtatcgaatataaagtcacattctacaaatttcagcttccattcttgtacctactcacagcaacgtaaattcccccgtctgatgacttcacttttgttcgagcacgccacctttgtcttttggttcggaatggaacacataaaaagaaggggaaacttaatgaagcagctcacgaccctgttatatctcctcgcctgttggcctttcccaaagccaaagtctagctgcctatttgtgtgggcattttcgcaaatatttccaccaggctaggtctgttgggcgactttaacgcaatgtaggtacgtatggctccatgagattccatgcggggatccctgcagatagaggattacatgaaaggagtcgggctcgatttccaggacaaataataaggaatacctccacaaactctggatgagtgtgcagtatttccacataaccctcaactaataggtatgacagcgaggcgacatggaaacatcatacatcgtagctacgagagatggaaatatatcgccatgagaagattccagagagcaaacaggcaggaagatctcaggcagcaatgctgccaatagcaacccatgcggggtctgccagctcatcatcgcatacaaagctgaatgccacccatactatcgataacatgtcttgttaactcggctggaattatttaatatctgactagcgatggaatgctgcaaattatgtgatcggtcttttagtgaccggcaagcttttcaacaacatacgcgagatgctccggtacatactttgacatttcgatgcgacccctgcaatcgtacttttgtcagccaaagcgccctggaccaacatctccgagactcgcctgtgcatatcatcacatatgactgtgagccttgtagcaggtcttttgtcagtcaaagtgccttggaccaacatgttcaaaattcaccggcacatgcagtatcattcaactgtgagctttgtaatagatcctttggcagccaagatgccctggatcaacatatccagttttcaaaagcacacatcgcgccgaccagcaccccgctggacaagttcttccgatcctttccgaggttcagatacaatccaaaattacccccttcggaatcatatgcccagctcagggagttctgtggctgggaaaaagagaatccagatggggaaaaggcctggaagaaatatcaatctgctctcgaagctgaggttaagatgtggttcggagctgaggatgaccttgacgcctggcattctctttgtcgagctatcggaatcgagcctttgcctgaaacctgtaagcaagctgtgagggtaagtacttatcacgtctgtatatctgcatgtttttttatgattcaaaacggagatctacaagtatttattattgagattgactaataaattgatttaggtcatccgaggtgtgttcgtcaatatcatcgatttgatcgactgggctcgaagtggaagcacaaccaatcgagtgcaaaggttctcgagcttagaacagctacggaaatataccaaacaaacgggaaaggtattccacaatcggcttgacgaagatgatgatggaaatgttgtccttcggcatctgcttcggtttcttttcaatacaaatcgtcgttattactattgatgcattgcagaaggaggctgggtaaaatggtcaatttgtttcattctcactgatgtagataggagatcatctgcaatatatgggaaatgaaagctcgagagacaaaaggacctcaagtgaattcctagtggaccttgggaactcgtcaacttgattaaaaagatcagaacttaacttagaagtgtaactcttgaacattgcccgatctggtgcgaatcaagatgccgattcatttgcagcaagggagttccctgattataacttgagaaaattaaagagaatgacaatatgtgagaaagcattgaagctttatagaaatgccattatttcttcatctttttatatcccgctttcacattgtcattactcgtccaagatgagtttcccgtctcttttggcagcatcagcatcttaggctagcactttctttgcgccttcacaagccatatatgataaagtacgaccaaacattgatcggctttttgggtgctgattctttatctagttttggtactatttttggtactatatgattccgggtttcaattagaattaagtgaaatgtggcatacttataatagtaacatacgtataacaacagtaataacacataactagcagcttccagatcgaagcacatacaaatgacaaccctggaatgatattggaatcaatccatctaatgaatgagggatgacttgttctttccacacaatccaagaaggctcagttcatataatacaaaagacctttccaattgtatgaacatggcccctagagtagctttccttagtgccgcctgtgggcacgtcttgcatgtctcggtagcgtggccagttcggcaagcgccgtgccctgaaagcgaatttgctggacatatcttggttctcttcggtgctcgttgatatcggagtcgtcagatgatgacaactctagtacaggctggaatgcggactcgtatcgatgccccgagggatgaagttgggtcctacgcaatagatcttctgtttgcacctgcgcagttggagccataccaatagcacttcgtcgagattgaccgacagcagaagggtatcgagtacgatccatcgccctattggtaagaatggtgctacgccagtcgtttcctggcgtttcggggaaaacatgacttctatccaagagtctggaggggactctttcttggatcaccatgcccgtatgaccgtggttacgtgcacatatatctgcgtagttctcactggttgtgaaataagccgcagctgccggtgtcgatgaaggtccccggcacccccggtaatgacctcatccggatttcccgttcgaatgtactcttcagcccgctctcgggcagaacctcggtagattacacgggatggtctggacctcatatagtcagcactatttaagtgaggtatcggaggtagtttcacgtacggcccattagccgtagcgggatatgccgagctggtttcacgaactgtttcaggaccgtaaggaccaatgatgagtctcgactcgctcgattgccatgatccatagggggtatcatagtaacttatgaaagaatagatgagtaccgtttgaaataatatagatgatggcatgatttactatagcacagtgcgggttcgtgtgtcatatcgtggctgtccgtccaagatccgtcgatgagacatgtgggcaattctctggaagtgcaaagatatcagctcttacactgggttatgccaagaaagggctataggagattcgatacgagagaaagacaaggaggatgtcgaagaccttgagcaatagaaagctataaggattgaatcaataacggcatcccttagtttaattattatatgtcttctacaaccatcccagaagcaaagggaggagaggggtcagacagacgccactgaaatcgaaaacagagcgatctaatttaggtgctttttaacgccagcttgtatttcagtatgtgtttcaacgggtattagttgagattactgaaagcaatactgctagactgacacttctactgtgctgattgtataattgaaactagccctgcatgctccaagcgctctcaagttgtgccagagctctccattgggaacagtggcgtttggacatgaggcgagtcaacctgcgcggatcattatatttccggctggcgtatgcggcaacatcctaaaactcaaatctgacaggcgtgtgtttccgattatcttgattcctctcttcgccagccaagcctttttgcagaatgtccacagcatgctggacatgccgcaatcgcactatccgatgtgactcaagcagcattccttgcgtcaagtgcgagaaagctggactagaatgctttgaacaaagaccgctacgatgggtgaaaggtgtagcaattcggggtaaaatgcgtggacatatatttggagaggaccgcaaagcttctgatgaaaatccacggacgcaactagaacagaaacaagtcatacattcgcgcacgaagtctttgacaacaaatattacaccctcgttcgccttgcaagatccttgcatacacaatctcgaccggtcatcgagattctatcttgattattgtgggttcatggcgagctaaatggtcccgtgtgtgcactaatgtcagacaagataatttacgcgtcgccaagttgttcattctatatgacagtgagagcaatccatttagaaggttgctcacttatgcgatggaaaattcaaccttgcgaaagactatagttgctgttgctgcaagacacttcgctaatgcaggccagtcatttgatcaggtcaatgatggcttgtcgcctcggtttatcaatgccaatttggatgcattccatttcaaacagcaagccatcaaggcattatcattgtcattatcccatccagagccttctcaaaaggacgcgataatgccagcaattctcctcctaattttccttgatctcctcgagtccggcatcgaaggttggaaatatcatctccgtggtgcagaaggcctggtcaatctttctcactcgatgctggagcctagtgatagtaaatctatcaacggcaaccctggagagacggtagaggagacaaggcgattcatcacccgacagttttcgctgtatgattccttcttccctatggtttgtagtgtgaggtcgctgacaatagtagtgtctcaacctttggaggtgcactctcaggttcaaagtcgagtcctgaattttgtatgaactttgacgaaagcaggcaccatgaatccattattcgaagctttctgggatgtcctgtattccttcttagagctatccgttatttctcgaaccaaagacacgtgatcaagagcttagacatgcatgatgacctctcgattcacgagcatgtacaaaatactttgagtatgcttgagctgacagcaaatttcgattgtctggaatgggcgtcaaactccgtggaatcaagcgtttcctcagcagcggagcttcaaaagctttctttgctatctcaagcatacaaaactgccaccattctctatggaaatcgagtgcttcgtgctttcaagacatcaaccgggccgatagcatctgacaatgaggagttggtgttgcgattacttgacgtgattgagtctctccaatgcgacccggctttgttcaagtgcctattgtggccaaccttcattgccggtctcgaatgccagactcatagtgagcaaaacctggtcattggatttctgaagatgctttggaacctgaccagttgtttgaatgtgataaacgcttctaaaatggtgcacgacaattggaagcgaaagaatttcgatggcaatttggcgtcgggggaatctgaattatatgtaatagaacaaggctggctgcttatttgatctgttgtattgcttccatgcaatatttgcaatgaatacacacggaagccatcacagaaagccaaagggtcatcgggatggttgcaaagcaactcaatcctagtggactctacaaatatgtcagcatatctagcccaataaaatatcggcttagtacttcgtgggttggagattactgttagccattaaagaataaaatcttatttcattatgcccaaatattacaagtacagctttcaaaagtaggtcgaatatctcagccgtctatctggactagtgacgacaccgcataatttaatttgagcgccacatgccataacttcctattcaggcgactagggcttaccaatctaccacttaccctgcccaataaccacttttctcggatagtgtctgacatttggaagattttcccatagatgcgaaagaatgtgaacgacatgtgtcagtgcgcggaaatttgccccggatagccccacctggcataacttcctaatcgggtaagtatagttccactctcaatcgacttcagcaggtccgagaaatatcagctcacgaaagacaaattttctagtgaattatgctgacggggtgctttcaatctctgtaggaccgagcaaggattccatttcccgaatttgaattaataacggggtgaagtgagtaatatttaaaggccatatatcccctccgttttcattactcttttagtatcattcaacggactctcaaccactatcaatttccctctactttattcaaagcttaactcattcttccgactctttccattacactatgtgccaccaggaaattgacgccaatggctggaccagcatcgcggctgatgctggcgccatcttcggcgaccggccttttatcaataagccagactctctctctatcaccgatattaaatttccatttgatgatcctgtggtcgcgaagactttgaagtatgcaaagaaaaccctgcatcccggaaccttcaaccattcgatgagggtctacttctacggtatgttagatgttgcgcatagctctagtaataccaaacatcgcatctaacatctgcttagggatggccattaccaagcagcagttccccgagcgagctgctactctcaacccagcgacttgggccttgacatgtttgctgcacgatatcggcacggccgaggaaaacctgacggcaacccggatgtcttttgatctatatgggggcatcaaggccctctctgtccttaaggattttggcgccactgtagatcaggccgaggcagttgctgaggcaatcatccgacaccaggatatgggagtggatggaacgatcacatacattggtcaacttatccagttggccacgatttacgacaataccggtctccatccgcacgtcaagggttttgccgaaatgatccacgaaaccactcgcacgcagatcaatgaggcctatccgcgcctcaagtggtctacagtcttctccggcgtcattcgcaaggaggagaatatcaagccctggtgccattccactcatcttgtcaactttagcaatgagattgaggccaacaccctcatgaagcagtgggagtgagaaccgaggactcaattcttattgatttatatttgagctttcgggtcacagtggctgcacctactagacatgtaaactttcaaacgaattcacctccgaaaattgagatgcacgagttcaatttgatacatggatcatttatattacgttgtattaaacatcaataaccccccaaaagcgggttttgacgtagctatacagcttcgtgtccagatcaagaatgtcatcattccgaacatagacttttccacctcaaaactccttgaggaacttctcgtaagtggggtacagattttctgcctttcataactaacgtcgatactagtttgataagagaaaatggatatttccctgatacggctgcgttgcgtagcctggtctgggataagaagtcaaaaaccctgtacatctaagcacacagtctttattttcaacgtgactacgcaagctagtactaatgatctctagttacttcgtcggataagacgggcaaacctaaagagatatttcccgacgttatgtggatagcacactttaagctcgccataccaaactcgaagaaatggctcaaaaatgaatgagatcaagatacctcaggatggaaatggtagtccgcgcagtaaattgttctaatcccttttcttatttcagttaggtaccagaaaatgcattcagaattttccctagtggaataagattcgcaatttgggggtgattctaggaagccttagaagttgagagacattctccgaaaataatggttgatctcctcaagcaccctaagttttatgcgctggcgtgatgcacaaaggtctctcgaccaaacaacatcgataagcgccgcccattccaagcaacgaacagttcatctagcgccgaccgtcccagtaaggagatttacaactcatgtggtacgtcagccaaatataagccgcatcttctaaataatcttagatcaatcccaggcgatgggagggattttatagatccatgcacggtgataagggtaaagagcgctaaaccgaaagggttagggctaaacctaagagcgtgatatacgatagatggaacaacctatccaatgaaaactaataaacatgcaaacagtaagcgagcaagcaaacatgaagcatatgataacgatctgtagtggatcgtcatataacccgcgaaaagacccatctagtctctagatgctgaaagactggcaatggcatttatggttgccattggccttcgaagaagaacgtggcgtggtcgaatgcagagagaaataataactgtcaagtggttgaataaacaaattttgaagaacttttgtataagttgaagatcaaaggaagaatttcggttccgaagtgagaatttaagcggtgcgtagatcggtgtcctgcttattcgaaagggggataatctagcttgttgaatcttgttgtggttgtcgtacacacgcgaagttgatcaataattgtattattatgtacgttggaatgatggtgcgaaggagctggcgagattgagaagttgacgttgaatctcggaaggtgatcttgcacgaatagcagcatccatgtgttgtacttagatgagcggtaaacttctaagggaagtattgaaatgttttggcggtatggaaatgaagaagtgggtttggtgttgaacttggacctgatatgtcttgacaagcttaaatatcaactagagctgctggatctcgctatgaggttgacgaaagtagtagcaaattcagcgcgaagctctgtacaattttgttggtattggtgatttattttgacgaagatcaagaggaggtagcgaggttcaaattttgcactggaaccgttgcctggaagtttcaaaaagaagaagaaaagtggattcagaattcaggattcaggaaagaagagaaaaaatcaggattctggatatggaggatctgagcagtctctcgcgcatggctggctgtaacgtctcggagcagtccaatctctagctcacaacctaaggtctgctgccggactgtccaaaagagaaaagatgcttcgagtgagtgagagcgtactcgcaatgagacctctgtgcagtgtacgaaagcgtgccagtacccaaaccacagggctgcgtagctgaggatcttaattgtcatatgcttacatttttgtgagcagtgggctactactgcgttattgggcggcagtttggtatatatgtcctcctttctgttgcttttatcacccagaacccgtgcatctttccacctgggcaagtatactcatttgcagtcgtgacttccaccctactctacgtctctgggacaaccagcacctggggacttgccctaaccagagagttgtaaagccacttgtgcctgcctatgatgaattgaaaggcttttgttaatttccctgtctgtctcccctcttctcttcttcttttcctcaactttctatactttctgcttaagttacagaaaaaacgacttatataatttgtttaactcctcctgcctcacgacaccgacgccgaaccctgaacccctctgtcgtaccagaaatggacgactctttgtaagtaaatcaaagatggccgcaagcaaactgctaacatctcatacagtccgcagaccgactgcgaagctaggtccccttctcccccctcatctgctagctatagtacagataccaccacctccccggtaaagcccgcggggcccatggggttctttgctgcagttggtgattcgtcgtcgtctgcgccgagttcgtcaagtcccacttccgacggcagcttcgctccgcgagttgacggacttacccaggtcattacggctatcggtctaacctttggacgtgaatcggggtcacccgatgagctatcctttggagatgatggcgggccggatcgaggggcggaagtgagtgttgcagcagaaacggtcaggcaagtccaattccttctgcggtatggtgattatgctggcatggtgtggaatgttttacgtaagatctcgcgactttccaacacgcctctgccagacaccgttgtcgcatttgatgccgaactcgacattggtgaagaagaccaggccgtcgaagaattgggagggccccctggggcctggcaaattctgaggcgactggtcgatcttctcaacaacagggaggggattcaaatcgacgagtctatggcaaggtcggcaatcaaggcgtacgcgttgcggaacaagctctgccacagcagcaaccttcgagataagtgtcccccggatatcgcccgcgatgccggggattgcgccacgaccggctggaccagatgtacgtcaaagacggagaggcaaagcgactgaaccaaccacggccgggccgggcaggttcagatcctttaccttacgtgccaacgatggaaccgacttactcgccatcgcgccgttaacgaacccgtcctagcggcacacggaacagcgcccctttttgcattcacaacgaaattcaaaggtaagtaagaggtaggtcaaggtaagtatggtaagtagcccctcccccccagcgaagagctcgtaccttatcgtggtgctggggcctagtaatcctttatggatgaagctaagacgagctcatatacagtatgtatctagtaacaaatatacttcatccgtatttgatgagcatgcgatccctttacttcttataagaatcaccgtttcttgattactgttttcttcgtagactgtgtttcccagtattgatttcaatcaccatgtaacttcggttgacgcctatttctaacattcttttagctcccagaaagatgcaaccaaatgtgaaacacaatgtttcatagaccgaagttcaaatacagcagtctgtgtttgcctttgccgatgaagatccgaatcttctgaatattacactcataaaaacccgaaacttaagtttctcaagcatatctgttgtttgatgctctttgtgtgtgttgctacggcgggtaaggctcatttatattagcatttcatgttaggcatttcattcacatagtggaaaggggacccgatctcaaaaaacagcaagtcaaatgatcttgaacaacagatcaagttatgtattgcctacgagccttcgatgctcgggtcattgcactgattctccgatgccacctagccatgtccgacggatctcgagtctggtcagtaatgtgcctggtggtgtgtcaagtaatagatctatgtacaaaaaagtgtgaccagagaaagtagtagaaggtagctcaccacaagcacaagctcttgtgacgtgccaggtcttccaaagataaaagggtgcattcaatacagaataactaagatggggagagaaagaagaagcaagttgcaaagtgggaggcagcctgttgatatagctgtccctttgcgaacattgcaaacctcgaacatctggcttagatatccagcaaacaatatatctaatgcaaatagtaagcaagcaagcaaacgagcgcgcaagcaaacatgaagcatatgatagcgacctgtagtggatcgtgacaactcttggtaaagagacaacagatacaggtcgttctcgccggtagacggggcggcagcgggatgtgaaaggacttggtgactgggaggaaatgtttcaagctgtagccttgaaaggctcatgggctcagttttcataggctgcagactccggatctcacagctcataactcaacctccagcttatctcgttcatgtcgctttagctcggcagaacgcatggcctgcaataccgtatagtggtagaccggaatgattaggcatggaccggggggataaccgtgatcacgaatgtctggacgatggcggctccgaaacggcacaggctgccccgggaatctttcatcaaaccagtcctttatcacaccgctccgcgttagtcctactgtttgctctcgaagtagagggtagggatagaaagtattgaatgtgatgtttttgccgttcggtatgagtttcaaagtgtcgacgaccctgacaacacagtcccacagctctaactcttcgctggggcacagtaaacagaagtagttgacgtgaatccacggcccacatttctggaatctccagcttggaaaatttcggacaagtcgaagaacatcatcaaggtagctcaatcccatgaatttgacccccattagttttcccgcaccctttgccgccttcacgatagcgtggaattctggtattcttcctccttcaggcgagcaacgaattacgatagtaagagagaggacgcgacgttcgtatagaatatgagttgtctcctcgttgaggtatcgattgcaagaaaggatggatagaccacagggtgtgctggacgtgttccacaagaaatcatcgaagagacagttccagatctggaagcgtagctctggtggtagctttgaaaattcgccgagtcgggcgaaaagtggaggtttggactcctctcgggagcaatcttggttcatcttgcttggtgtttgacttgaaatgaggtgatgacgaagaaagaagatgaaagcaaatagagatgagacttatccatggatcgatgagttccgacgcccagctctgactggcccgatgccgaattaggctgtactagtgatctcgacggcctaaggcctccaaatagtcgttgcagagtgattctgacttccaatgctacgcaaagccccctcttgcatattcatttcagtaccgccttcctaattaggtacatttccctgcctcaacaccccacatgcctttattgcggagcgaagcgaaacaagtataaatcagaaggtcttacgtacgtgtcacgtggccaagttttctctcaggggggctgaattatgacaaaagcaggggagttgatctagccgagggtcgctgtgaagccaataagccagtaagaggggggctttgcgcagcattaaagttagaatcagtcgcttcgctctgcaacgactatctggaggccctaggccgtcgagatcactagtacccccatatagtagcaagacagcaggtacctacaatttgtatgtaaaccactaacaaaattaagtcacttttatcaccacatctacttcatcgtcaacaactgctccaacaactgcttcaacaaacttcagaacttcaatatgtgctccaaaactgctccaaaattgctctatcgtcatcaggattaaaacatgtaggtatgagataaaatacgcatttctaattctttctaatcaaaatgtagggttttttgagtatgtaaacagcgcctgtgaattactgcctttttgggttagcgccccaatacgctccgctcctgatcacaaaatgagttagaacatgagctaccaaaatcaaataggagtgtccatgggcatgggtatatattggttgggagagttcttaagggaatattgctctataatcgtatgttatgtacgcacatattagaagggtctatagtgatacttgccttatgcttctcagtcatttagcgtcaacgatctgtctctcaactgtaccgttgcctcgaaggccttgtatgggccgagtccttttagggcatcgaggagtgacgctaggcagagcgctggatagttctataccgaagtattggactatttgttgtggttgtcaagttataatcaagtaaagtaaatagtcacgaagttacgaagtatgattgaagacgaatacataaactaaatatataagtgtctagatacatatatctgcgtttgggatagacgactagttagtggaacactagaatagttctattttgtgactgttggctaccggaaatccaggaaatagccatgccacctgctaggcacgtaatctgccaacttgctaaccagagaccaccagcacgagttcgcctgatttcccccattatccaaggagcagcccaggtagggcccaggtggccagcgcctcaaatatgacagacaagattctggcaatagcgatgtgcgtcgaactatagcctgccgacagtagccaagtgacagaactgtcaagcaaagcagataattgatcacgaagtacgcactcgcaagccgtgaaagctgtgccaagagaaatagttgacaaaggatggcgtatgcaagatggctgtatatgaagaacagcgtcggagaaacactcgcgaaatcgagatgaggccaattatcacatcttatagatgggacaatgagatctatgacctttttgtcaaacaagatgccaaggagcgccaaggagccaaggccagccatgcgggatattgagcttgtttcgaaccgtccctaatctactggatctgagcaaagggtcgaggtcaagtctacgttgatcgagctgtggcgcttgtactactctagatataattggcgtaggaggatgcatgcgattaccattatcagcagggtccatgggtgcacaaaccagccatatgggatatagaagaaaatgaaacgcccaatgtacgacagctagatatacatgaggtgaaaatggggaaataggagtcacatcgattgtgctttgccagtgcgtggaagagaaaatgggaacagacccactggccatatgagcgaaataaattagaaagtagaaactagaagttggaggctgagaggattctatccagaccccgttctctcgagcgctgcaggcgctccggggcaatacacttcggcagatgcaccaagtgcccccgctcgatccgtacgaagatcgcgtacagcagactggcaaggccaacagcaatcacactgataagggccggccacttgaactgttccggccgtgagaaaacgatcgtggagacataagagcaaatctcgaataggttctgccaagcagcttctatcgacgaaaaagagcctcgcgcctcggcttcaataccctgtaaagtcccatgaaagtcagggcctggctatatattgaaagaaggcattggcaaggccgtgaataactcacctcctgaataagaatctgtacacatagatcgaaccctcgcaagcctacccggctgagaattggatactctgaagagttacagcgatctatcatccctccctaatccatctcccccctctccctctcttccccctattcctatcatcttccttcctcttccttaaagtgtgctaaggcttatcagccaaaagaaattcctcgtcacttcgattattatgtttacaatctggatccttgaggtcactattacaatatcgggtagtgggttcttgagtatccgtggcttattagcctgacgcttctcattatctctatcatgcagacacaattgagttcccatttttttatcttactttgagttccagccaccaagcaaacttttttatcgtcagcactacgtattgcgcgtctcaattgggcctcggagggaagtaaggtgagttacgtgccttccagtgctgggagcacttggctaactccacccatctcagcagtttccctatcgaccagccatgactgtagtccatcacgacaacatggaaccttcatcagagcttattggctttgaggaagcgcctccgatcgagaatcctactatgccagttgctgatattccatggagccctccgcctattgatccattgccagaacttggggataccgagagagcaaagttgatcgacaaactaatagaaaaatcaaatgaaagtgaagcggactcaacatattgggcatgcctctggttgtccgatattgaatcccttcgagagattctccaggtggcggaatgctcccagacctatgcgtccctctccatgacaggcgcgaatactttcgccatgatcagggcttgtgagctacttccgtttttcatacccctttctaaccgacggaaggactgacattgaaactccttagggaaaacaaagccgaggatgatcgcagggctgcctgagacacaagggaagcgaaagttaggggaggagagcccgaagcgaaagttgaccgcaaaaacagctgtgagtcgtctaatttgcatggagtgaggaatgatctatgtactaataccttgactagtgtcttaagcgcgatgatttcagctgtgtgatcaccaatttcccccaggtagatgtggctcacatctacccactatccctgaagaaaagtcaatcatcgggaaacaataagaacactgacacgtacgacaagttctggaaaacgctatacatgttctggggcaaagaccaagtcgatcaatgggaagcccggttgacgggcccatgtggcacagagctttgcgagaatttgctttccttgtgccccaacgcccacaggctttggggggcttgttactttgccctccagccgctccatctgcgcgatgacggtaaggagttgatcacacgcttctactggcttcccgaggtcacgcgacagaaggttcagatccaggccaaaccgagtatttcgcttcatcctcccgcagatttactcaatcttcgtgttgagaacactgatggatccgcgcacaagatgaattctggtgatctggtcattttccaaaccaaggatccagaaaacctaccattgccttcatgggatctcctccaaatgcaatggattctccatagaatcggtgcccttagtggagcagccaacgtccctatgaggccgtgggattgcgatagtgaggatgagggttccgacatggggctcgaagatgttttcgagccttaccaggatgaactttctgcgggtacggagtctgaagatactcttgaatcttgaacccgatgaagaagatacgcagttgccgccgattcttggccgtccgtctcgtttccagtcttccttcgagatcaacccaaatgcagacttccctcgccgacgatctccctccagtgagaagtctctacagaaaatagctattcttccttccgtcccgcatgctagaagctcccaaaacatcgcaccacataaccccacagacctagtgaaatccccgggtagaagtctcttatcattggacatgactcctaggaggtttgcttgtcgagggcaaaccatagcagtcgtaggataatgcttcttcgttttttttttctttcaaatttcacttcccttatttgaaagtcccatagcagcaacattttgaaattgaatctcattctggatgatctagctatcatccacactcaaaccccaaatatagacaagacaaattcggcgctgataaggatcgacctgatgatccatagtatccatctgatcatcagatgagaagcgatcaagaagaaatttttccctttcctcactcagttcaaagccacgcgatcttatacaacatccgcattctaaaagtgcagtgtcccataccaagcgccccggctgaactatttgcacattgagcatcaagacaacatccacaatcacgaccacaacacccgtttctagacttgcagccttcaacaataattggatgcatataccacaaaggattggatctccataactcaaattcccgttgtaagggcctggaattaccaatgatccagccacgggtataccaccaggctcgtgtcagcatccaattctcttggtagagtgtgctcgtctcgtcctcaaagcttggaacgccagtgccccagaaactcggattatggttttccttggttactggtgtctttgtgaagctgttatcttcaagcaagctaatatatatctttaaagctacaactagttcgagagataactcgaagcccacccgatgttgactgtatattccagcccgaatggctcgaatcgtgggagcaggactctcggtatgcgcccacgcctgggttctttcatagcccttacgacacacggtccacgtacagcccctcccctttgtatgcggtcgataatggcaataatgcggcaagccaatcatgaccggaaaatctcgaattacttcagttttttcagtaggatgaggattgtacttacaatgaagaaccgccaacctatatctattatctcatagagtggcgggtcaaggtcaataaccgaatcgtatcgaaggataccgatgaagacctcgtgttagctctaagagactactggcagcagttcttggaaaaggaactgtatgatctccttggatgtaaagttccccgtgaccgaagggtaagaggtgaggatacttccattgttatatccgtaagggatcgttcttaccaatcgctatgacaaaaccgatattaactagacaattatcgaccggcaactccagaagtagtcagttctgttttattaggacaaggagctgacattgaagataggtaatacagcagctcagattgacgagctggcggatgcaagaactgcttctagtatttagctagttggttggcttcccgctataatatcagactacctcaaaatttgatagttgtcgtgtcctatatggaaaaggccgagctctgaaatggaggttgtcacacgagtatcctgcgccagctagcacctttctggacaaaccgatccaaagttacgggatctatggtcatcgcgcaatcggaaaaatgaaagtcgcggttgtctgggtcgcccttagcaggaaaaatggattaggtaccttttctcccgcgccccattcggattctttgattgggatgaagaagagggctttttaaatcgatggtgacttaatgatcagattatgccagtcccaacagacatataggcaagatgtcagaagagtgcgcatatttgtctgaagcagaatcatttctagaacctccggtgttttcaaggctggaggagtcaaggtcgacacaatgaaggccttcctggccgctgatctcgtggccggtgccatttcgcgatgcaggacgatattatcaacagatgaccgggaactataggagagctctgaggggcaactgcattaaggcgatatctaggcgctatcggcagcagaccctcactagtgatgaccgtaataatggaaaggtgcttccacaatcataaaaaacaagattgtcggccgccccagggcgtcctataaatcttttaacgatgctgtacttagatatgaatgaattaatccaaaagataaaggtgaccaacgtagcaaaaattcccgactccgactggtggtcatataattgcaaatctctaagggtataatgctgtttaagtgacagaaacaatcagagattctatatgacagttgattcaacgaagttaatcaaattaaatgattctagtatagctatttataatagagatgttatacctgctgtaaggaattgaaaaagtagtatatatgcttataataaaaatgctattaatttaattcctattaaaagcaaatatgtaatgaaattaattaaagcttactttaatttatatcatttacaactagaatctttattaagaaaaaatagattacgtcgtagatttagaaaaatatctacaagtagaatatttattagtgatggtgaatttaaacatactaatgataaagtaaatataacattatatgtttataataaacaaaaacttaattttttattaaaacttaaaaaaagatatttaacattatttaaaaaagctaaatttgctagaaaattaaaattaataaaaaatgtaggattaaatattttgtgtaaacatcaacaaaaaagtatattattaagtaatcttttacctaaatataatactcaagtaaatacagcacaaaatatttattattcaagatttattaaaaaaagttttaaaagattaagattctacatgtatttaaagaggtctgaatgaggttgtagagaaatgaggtggaaaggagtacggattttgatggggtatgacgggcagaactacccgtaggcggtaggaagcgattagccaataagacaacacaaaacagcccaaaggcggtctaaacaccatagtctttaacaaactcgtgcaagcccattcacccatgagtggtgagtgacatgagtgatataggtatgacccatgaattattttaaccagcatatattgaagaggtagtgatcttaatggtcataaaatcaatttccggactctctaaatctatacatatcgtctgttcgtctacagagattgatctaaatgtaagactaaaatctctgtatttacacagaagggattctgccatgccgccgcaagatcgtgttcatgtcacgcgtgtgccgatttttgtttctctgcctccacgccagtctcctcttcttcaccagatgttgtaattgcagcaggctgctacgctcggtgcccttgactaggcatcaagcttttgtgaggggattccaaccagaaactctacccctcagccacaccaaaaagattgtcgcgaccatgaagttcacgccactgaacaaggccgcaaagccgaaagagccccctgtctctgcaattgcaccagcaatcggagggctcgtaagggtaccaatgcctgcgatagcaagagccagcccgattcgaaacccgatctcctgaggtgggtagagagtcatcagaaggggcggtgtcaagccaatggtggtgccagatccgataccaaacaaagcggcgaagacaatgttggccgcgttactgcgaccaggcaaccacaaggccagagtgatgacaccagtgaaaaggagcatgatgataagcacattgaaacggccgtacttgtcggcaaggccattgggaatcgtacgtccaaaaaagctcgctccgttcatgatgggaatcagattgtaggccatagtcattgacattccgttgtgcatagcagacaggacaaggtagtcgaaagggacaaacaatccccctaaaccctggttagctgtgttgcgatgaaacataatgataggcggctcacagtaaaggaaaaagcagaacgtcaacaagatcaagaagttgaattccgtgaaaggccgaaggtagttcgcaaggttgaactccttgcgagtgtgaggcaagttggaggagatggtgagcatggcaatagcccagagcccaaggatcaagaaagcgcagattcgcatcgtccatgcaaagccgacctccgaaaggaggttgttgaccataaggggaaagattacaccacccagactcgagcctgcaacggtcaatcctcctgccaaagcgcggcgctttctgaagtaagtcataggctgcgaagcttgtcaaagaatgcgcgataagttccaagagtgatcacacaaaccgaagtcattgccggagtgaaaatgagcgatgtgccgattcccgagcaaatcgactgtgccaagtagaattggtagtatttgcttgacaagctggtcatcatgaggccaaacacatgcatcaatccaccgatacagatcggcaatcgtggtccatagttgtcgaatagatatccagacaacggtgacatgaacagcatgaagaaaactagattgaaatgagcttgttgtttcacggccggttggggaagaaggctctcacattcggacgaagtgatccaggacacctccgagctgctataggttttcaactggttggtctgatattcagcttggaacagagcaatgcaattgacccatccaaatgagatgaaaagacccaaggagcctccgagtagcgataagaaggcatttatgcctccttcaggtgctgctggtgggctagatgcttgaggcttgggctccgctggactcgatggtctcgaagaggttggactgcccttttcgagctcagcggtacggtcgtcgtgcatagttgctgtggggtgcttgatagggcgcgcaaaagatagttgtgcttgtgatgtcgattggaataacgagtccgattctaaagaatatggccagtactatatacctctggcacgaggccaagttctgcgtatgaaaggaggtcggatatacatgctgtagctagcaatgcccgatttcgagtaaaagatcggacgtccgatgttgttcgttggtgatatacgcaaaggcgctgctgcacacccgaggccgagtccgcggccgagctattcaaaaggaaagccgaccccggtcggcctcggagttccggactcggcttggatgtttttacctataaacattcgtcgtccacctgcgaggttttaaggaatcattcaacaacaaatcatggactatcctcctcgccgattcagtcgatttcatgccagacaagtctttgctcgagccaactttccgctgcgagcatacggacccagaagagggatggcgcttctcaagatcggtctgttcggcactgttggctacttcgtcgcgaagaagcttcttcggtaagtcggtactcccaagacactatggtcaagtcgagaattatcaactgacgtctatcagagactcgaatgagccacgtcaaaatcctcaacaatgtgcatcgtgcggacatgagcggcagcaagaatccaggcagcaaccgacgaacgttcgacggacgccataccattagcattttgcagttatcagccatgatgccagtcagcctcaacaatcagctatttcctaggttcagtagtcaacaggcatacttcgacggctcgggcggtggtgacggaagcaatggatataagacgttggggtgggcttcgacttactcaagattctataaggcaaattgggactgttaggtatcgttgacaacctattgttctggcgctttcttttcatagaagatagaggaagagagtactctaatgactatttttatcttaccgcctaacgaagatattcaactttgaagattgtcgtccttatggtccgaaattcccaaataatattagcgtatatccatgtggtcgaaagctctcagacaggtcagtgttgtagtcgaaaattctcagattagactctatataactagggaattcagggtaaatagtgtcgctagggccgattttggcatacctttcttcccacggaccctataaccaataacggctctgtcggcggcgccataatcgcgcaagacggaaaggagacctggacagtccacgattatttaggctctgactacaatgcagccgatttaaccgtcgagaagacagtcgcccagttccttggcggtatgggctcacccaacccgatttctattgatgaagtaactgcaacctccatcttcacgccgacagtagttctcgccgaaacgtggagcggaaatcatcagcgcgtcttccttgccggagatgcttgtcatcagacaattcctttgggcggctacggaatgaatatgggccttgctgatgcttgggatcttggctggagactcccagccactattcaaggctggggtggcactcacttgatgaagacatacgaacaggaacgtcgtcctgtggcagcgctgatgcaacactggcgcaaaatccacatgatgaaaattatggggctttcaacagctgtaaaattggatccggtcgtcatcgaatccatggatgagcgcggcatagccctgcgtgaggaaatcaatcagtacattcagcaaaacgatgaccataatcagagcttcggcgttgaaatcagacagcactacgagtcgagtctggcagtactgagcgagcaggtagatgttgaaaaggcagcatcacagttcgactcacgcaactacatcccaactacctttcctggttcgcgggtaccgcatgtggctttgtctgacggcagcgccatttccgatagattcgggaaaggcttcaccatggtcgcttttctgcagaaagaagcagtagcagccggagaccaatttcaggtgcccatcgcactggccagttttgaagaagcagcacggcagcacagtattcctttaacgagcctttgtttgatgaatgagactcatgcgttccgaatttgggatgcttgtcttctcctcgtgcggcctgatggattttcagcgtggcgctcagatagtctggacaaagtgcacaatgcatcacaagtgttgcttcaagcaacagctcatacctcacctttgtaagcaaacccctccgagacagacgatcggacatagaacagaatagaaagaattaacctcaattaatcacgatcttcatttcgcaacgtaaatcgtcctgtggacttgctctatcaaatagttggaaccaaaaaggccgaaaagtccaagtagtcggagtcctgacttcagtcagtagtgctatgtaagaggcgcatatttggtaatttgtactcaccattgcgccaaaatccaggccgttaagaagctcattatcgatcacgtcttgcgacacttctcggggagtgttggcggccctgtaggactgtagtacatcgtaacactccttcatgctgtcttttgcagtgttcagcacagcagacaaaatgggttggccgcgttccatggcgtgtatctgggaaagaatgccagcaagaaagatgtagcgtttcaacgtaggatggcccaactttacgatctgcagtaattgttcgttgatgtgttccaaaagtcggatgatgggcgctcgctggccgcgcgccagttcagcgagaggatcaaggaccaatgtgtggttgagaccaatcgaagcagataacggaccaaaacccgtttcctccagctgagacacaacctccaagcccaagactgaaattacgtccaggctcaaaggtccgcgaaatgaccctgtgctcatcaccatcaacttggaaagatcgtcaagagagtctgtaggtagctgaagtcgctcggcataagtggcgataatcattgcagactcctgacaaaccctccgggaaaaatagaagcggggatccttttgcgcttgtagcatgaaaggccgatgcagaaccagaatataccgacgaatctgcatatcaaggaaagcgtgatgcatgcttaggaattgcgaccaatgcgatcgacaatagcttgcaagagtacggcaaactgtctgaagtttcgtagctagctcaatggccatttcgtatgagtgctctaatcgctcgttttggaccgccctgacaacttcaagtcgtatcggcagggactgacgcatgagaatttgtatcgacgattccgtatagcttgtcaacggttctggagatggagactctttgctggctgaatctaaatcagcatcgctgacattaagaggcatatgatcgtcaaaatcgtttgaagaaagaagcaaagggatggaactgtccatggaaccatggattacgagctctaggactgttgtccaaagcctgcttcgtatcccggcttgaaaaggagacagagaaaacagttgtggatctcgatgcaggcccatagccatagccacccgaagtagaccactttccgacagccacggtgaacggccgactaatgttatctgccgcgaaaccaatagaagacagaaaatttgaattccatcaagattgttggtatttttctctgacggtccaaccatccagtattgagcagcttgtatccaagtacgccgcgagcgctgtagaactttgtcgtcgtcgttgctgaagacgcttccaatggccaacaccaaacccaacttgattgcaaagtttgtaactacaggctgcggctggctgaagtattgttcgtattctgcccagaatgtgggaatgtgaaaacaacgatagatcaactcgaaagtccgcatgtagtgattcactagtcggtcacagatggaacgagtcggcattgtactcaaaagttgaggaacggggtcatccatctgcggtgcctgctcatttttcatcgtgagtcgcaagttgcgtatctcattcacggaatcggccagctcggccttggtatccacgaaggtcaattcaacgtcactgtctccaacatggctgactctgaactattgacacatcagccaatgttcaactagtcaaggtgttcattagaaaggtgcttcaacgataccttctcagcattgtgcagccagtggcttgaaggaaatagttttaccttcttctggttgtgacgaagtcgagggatgacagacggaattgttagagacttatcgcccgtgacagctgaaggcgcaggacgagcttgggagagctcagcaagccgctgctcgacgtgttggaggcgatcagacaatgccagcagcgtgagatgattgttgctgctgctgctgaggctgtgctgctggggatcgacttctggtacaaccgagtgctcaagctgctgtacacgtcgctctacgctccgaattcgctcagattcattcgttgttcgttgcctctttgcagggtgatcgatgttgttatttggggcaatgctgagtgagcgagaaacttgttgttggacagtattgccctcgcttccacggtcttccagggcgagactgggttgctgctgatctccttgatatgtgcacgtcaccgattttctggagacttgacaggctgaacatggcgatttaagatcgcaacgtacttttcggcggcggcacgggtcgcaggattgcacaggtcggcggctccgacgagcgggtgaagatgctaaccgggtactgccaaagctctggtcctcagccatcttgacgacagtccaaattgcaggtattgaatgcgcggtcaacggacatcaatgatgttggaaaggtcagagggaaagctcggggtcggcaagctgctgaagtgaggcgctgtacgggcgactaagtgccatcggaatataaccccctcatcggataatattgccaagcagtattttagatccgcccccagctgtgtaatcaggctctcccacttctgtgtctactctctcattctctctttttctctctttttacaactactcgaacggagtacggagtacggagtacgtcggaaactaactattagtaatattgaagcctagacatgcatcattatacccgaataccatgcctgaatatttgccggtaggaaatgaaaggacaatgcgctagtcctaatctagttaaatttaaattcattctataattgcttcgcttagctccgcaataattgaaaattaatgcttcatgactatttagttaaataactagttaatctatttatacttgaattatgaagtatactactctgaaagcttaccggatccgtcaatatgaagctattcggagatacaccaataacgaagacttccaatttcaaaactgtatttaaatgctggatagtagacagcattgaattaaatgaatgcgccaggtaactaattattgcggagcgaagcgaagcaattaaatcataacctcgtgtatgtatatcacgtgatcaggtatttttatcctatgggctccaaaatcattgaaactatgtcacgtgaagtattgtcggctaactttggcagaataaatagactaggcctaacggacatgtcccgagggtccatgcctggagaatgaacgaaccatcattatcttccccagagcttctacagtcacactttacgtagcattagaagttagaatcagtcattttgctctgaaacgactatccggcggccgcaggccgtccagatccctcgtaattatggtgtagaaattggtacggagcactccatatagatgaagctattcagagatcactatagagtacataatgcaaatggcttccaccaccactaccaataatagagatattccaattctgaaaattgcatttaaatgctaagtagtggtaagtattgaatttataaagtgtgtctggtaattaatcatagtcatggtgtaattgtacgaaggaggatgaataacagagctctcgacacaaatcctggaattgggcgaaagcgaagggcctgctctgagaaggcggtggttgatgacggtgagctattgtccaatgagagagctatgttccgatggcacacttagtcgcccgtagtgctgtcccatcttgctctcggactcggagctcggacataaagcccactcctctaaacgttcgccacccaccgaccaattcaacctcctcagtacaggtattttcatacagccctagtcgtccccgtcaagggcgttgacacctttgtctgcgaacgggtggaaagctttcgtactgcgtcggagaggactgatgccaaaatccttccagttgatgttccaacgaaaagctgattcattgctccacacaaggcatcgcgcctatatctttgcatgaagtgactacctgggcaagtgatttgctcgtaaaagttatatgaccgtggacctaggctgacaatcagttctgttgagttacaaggttgaaagcaagtaatacagcatataaatgatccactagatactaacggcagggagcaaatgtttgtatgcaataatggatgattggaattgcctaattctaggagtatatctgggcatgttgaagctttggataggtagtatagagttttcacgcagtggatcgctatataaacccaccaataaacgtatatcgattttcctgtactaaggacgggccaaacttcgaggtaaagaatggacgcatttactatgaaggcaaggcaattgaaattagggctaattgccatgaactatgagttcagcagtctcagcgaattcgcctaaaacaattatcgtacgcgtagatgaaagagaatttgtgattacatattttggatctttgatagaattcaaagtggttatggattagtaccgatatgttctatggagtttacaaaacgcgcgaaaatgacagttctttattcagctatgttagcgagccatccgtttcggaggaacttatgcattcttggccggttgggcagcatccaacattcaaaagacccatgagcgtactttgtcgcagactactcattcattgcctttgcctcttcgttttttttttggatcgtaggagacgtgtctatcacctcgtttaaaacttaagagagtaaagcatctagaatactggatatttatgcatttgtatgtacctgaatagccgcaattatgaacttggagggcttagcatagtaaaccactaagaaaacaggcgatacatgcatttctacggtagaaatagcatcatattgacgtactgatcatttataatacgccataaagagcggtgtggtaggctaccataggcggaaccatttcaggcactcgggcactaaactacttcccaaagggggcttacagggggttgggaccctggcactcataccgcttcgtagtgcggtccctacaaacttggtagatccagggacgtagagaaccagagattttatatcagatgagactggcagtatcgcactatctttgatagtggtgatgggtttatcaactccccatcttgagaaacgagaagtgaaggctcagccaatgatgatttcgacgatttttcccgcggcaaacacgcaatctttgccgtcccagtcggtcaagggcggagcggcatagcagtacagtatcctccccggcctgaatatttcacatccttcgtgaaaaaaaccagacgaacacaagcccaggccccgaaatgatcggctccggacttctgagtagtgagctggtagatcgagaagaaggagggcgtctatagacacggagtctcgatttggctcataatcatgcaccttgaaatcaatcacttgatcagcctccatgtcaacaacagaaccatgagtgtcagattgcgtcgatccggagtcctttgaccactggtaaacccaatatctaccgcggacaccctgatcggtgatcaggacatcccggccccagtgcatcggctcctggagtttctgtcccagcatggctcgcggaagacatctgaatccaggagttgacaacttggggtattccagcagaaccacgtccttgggaacagtgccaagttgcagccagaaattcttcactcgatcctcgccggacatgtgaacaagctgggagacgtcgactccgagaagaggagcaatcgcaagcagttcgtcttccggcctcgaggaatcgcgtaggcacagcatctgagagacctgtttcatgcgaaactccacgttcgtaagggagggaagactccggaactctcgcagcataagtgtctcgatgctgttggagggtcgcgtgcggcagctctgatctaaccgctggacctcgtcaaaagagagccctgtcaattgcgacaggccatgtagcctttcatcgtcaattggttcgtctgttccgtctagtacatcccgaaaaagtgatgaaacctccgcgagacctgcaggaaacaagatatacaggctttttgatagaatggcttcttgcaaggtccacaagcgccgtgaccaggcacaggtcataagccgaaacataatcgagaacccagtcaggttgtccggagtgctatacaagccattgtccagtacgatagtcatcgaagcttcagaatacacctgtctcatcttggtaatggccattttccgcaaccgtgaatccgctggaatacataacgcatcgatccagaggtaccatggcacctgagcggattcagaatgcaaagagctctgtgccgaggcacaggcgagaccagcgagatgctgaatctggcaccctggaaggcccgtttccgaggttcccatcagaccgtcggaccagacatgggagatggcagcgaatttcattccttcctgatatttgctcaccgcgctatatctcatgcgatccctctgtgagtcggaaataccgggcatgagagctaactgtaaacgtcgcatatcaatcaccggaaagccaccaccgtcgaccgcggcaataatttgatggagacccggggccacactttcacacttacagtccggctggcgatgcttggccttcgcggtatccacatccaagttgtggcctatgcacctctcttccgaacacgcctcgtgtctctcagtcggcccgtctgtggcagggaagatgcaagcatattcgagaaggtgtaaacttccggatattgagccgaaggtattatacatggatggacaccatccttgactcagcaatcgaccgcgcagctgctcctccatgcctggtgttcgcatagacatgagggtttgcatcggcctcctctcatacagcactgggggcgcgatagaaatcatatgctcgagcaaaagcagcgatccccgaactatatggtcaagcgcagtttccgtgctttcgggaagagacacttcgccggataaactgctttttgccagcgctcccagtccaaacaggatggcttccgctttcacacgcgtgtcgtcccactgatctcgccactgtgaaattggccatccgaccccactcagccgcaactcccaggagactttcagacccctgagaatcttcgtgtcaatgacctttccttgaggagtatccctcagactcgctgagaaggaatcgaacaaagcagattcaatcacaccgaagaacaaccaggactgaaccatgggtagtgcttcgtctggatcggagaggatccattcgataacattccgcgccggcagacagttgcgtacctcaaggtactccctgaatggaaccacagggtatctttgagccgagtcatgatttccgccaaaccaagggatatactgtattgcatccccgtattgctgcctctcctgttgggtcaggaaatagtccatagtaagatatttgtgatgtagcgaacagtgccttgcgtattgacaggatggcaccgctcccgatgttctagtttgaagctgtaagagtgcagttccgaataggacgagctttggttgattggacggcctatgaatgatgagtgaatagaactcatcgtaagtcctttttgtaacgcttaaatatgtatgtctctgggtacgctttttggatcgaaatccctgaaagtttacagtatgtaacagccaaatcagcatagaacaagtcgagatttctgatctaattggggcaccatgtcaacaaagttacaataccaatattttaataccggctgcagcatcggcttggagttagtcaacgagggtattgggcatcgctgccaactcattcctcttgaggctgaaagtgcggggtttcgcccgtttcaccacaacacccgggtatttccaccaccttcttctacgtaagtggatattttatagtcaatggccgcagatcaccacccaggcccaatatccttggaatccgggtggatattgtaaccccaaactttcagtagtgggggcagtcagaaacttggagctagggttatgtatgaggcgtgcatttgtgcccagcgatcaaggtcggctgtgccccccagtcagcgtcgttctaaaggctcgttgtgcagtctcacagcccctcgacttctcggtgggaagcaaaatccatggatataaagagcgatgcgccattaaatatctacattccttttgcaggtgattttttctaccaacatcgtctctcgacacttggtcaaaactttcccataaccagatgcccatcacccttaccacggcggcccattgcccccgcaaatgggaaaccccgaaggtatccactgctgaagagctattcaaacgctcatgtccgaaggaccatgagcgcagccggaaattgatacagagttcgtttcagccaagtctttttcgcacgtctcatgtctctgcctctcgacatggcttcgtctgggccgtgtttctagcctacagcgatcaccataacctgataatacggcccgaagatgtgtggttctccattctgacacaactcagtttctttgtgaacgcacatgcagaggagctgcgatcttttttcgtttcacacgagggacaaaaagctcttgaagtcattgaagtgggaactatccactccgctgactttggtgcgttggccttacgaatgaccaggctgattgagaaaagtgtggtggacgaggagttgcgaacctggatcatgccagactttagcacctcaacagaatccgacaatgtggtcgcagctattttgatattgtgaagaaacttgagaagctatatcagctaggggacgagcctgcacggtttgctcagcttcttcggccgatcctgaatcatttcgttgcttcttttgacactccaaactcacctgatgtactgagtttctggagcagatgtgcccacaagcactctatgggcagtggaccagactatttatgtggctgggtttcagctttctgtttctggggtgaagatggaaagttattatgcgcggaatccatccattcctcctcctccccaaatttccagacacagaacactgaatgggggttggatgctgttttgtcacgtcgcatcgatacagatgatgtcccgtctggtttcgcctccgtgccggttactatcgacgacaatggggtagtttatgacgctgttatgttagctggactgatcggtatccaagccacatccagcggagcaatgttggatggtactagagatcacaacgacagtggtgtgtttcaatacaacgcaagcggccagctggaaccgatcgtttatagcatttctcctccgactgaggaagctgcacttgactccatacagccgttgtcaggatggtggatccatgaaaagaagcgtgcgaaggagacagaagaccgcaccgtggaaaaaaaggaattgcgaaccacagaccgggctctcggggccctcgacgcagtagctcttcggaaattcactaggattgggagttggaaaaggtccccggacttgaagaacttagcattctgatctaagcgatgaagtctgacagcgtgaggaataagcttatgaggtatagtcatttatttggtgggagagtctccagtacggttctctcttcacaatcaaggcttcaacaccggaatagaatagaattgagaatttcgtcaaatgagtgattaccatggtagactcaggccaaataaaatagtacttacaagtgaagccacccggggcgtgatgccttacgtgcgatgcgcttattgagagccctctagaaatctttacagacggctggggtttaaagaataccaccaatggtcctactggtgtgaatctttatgaactattcacgcactgttccaatgtgcactttggatactctgcgtacaagtatgctccttagatattccttctcatataacccaagagccactgagcgcagcttctccaatcaaacttggagcggtgctgatttgaatcgaattctcgctgctatgaagttgccaaacaccgggcagatattcctgatatgcattgggaactagagagttttattgaatgatgttgttcttgtcaacgttctctgagatggaagagctgctttggtgctagcactcctctgagatggacgtaatggagccttgttggccttgggcggaaaggaagaacgtttgaagggatcgacagcctgtttttaccacgtggggacatgcctgaaaagaactgtgataggaaccaatctagagggatgaatattcgaagggaacagacaaggtttcaccaagcggtgtcggcaggaaaagcatattactgcagctgcatccatattagctagcgtcgtcagatacgctcagacccatagaactttggaagccgacaggataagtttaccatccgcaccctgctggatttattggttgctgctccattccagagctttcgacatgggacattgacaagttgacagttctctgactggtaaagatatactgtaatcaagccttgaaaccttggaacatgtatagacttccatggatctaggtagccatgtggacgagtcactaaacacctttttcaaagttcaatgcccttatctagtcctataactgcgctgagcaaacctgctgacgaattagggctgagacaatctgattagtctattaaactaagtaatccgatccggttgaactcggttctaaattgagctaagcgctattagctagggtctataaggctctcgcacggagtgctgggccgaaacagatttgcagtcccgctgcatagggatgattctcctgaaagggtgtagggcgaatgcgcctgtatgcgcgtaggttaataatataaaatatattgataaaccatctacaaactatagaccagccgatagacatcgtaggtgtgagcctttaggctagcgtcatactaaatgaaactgttgtctcatttcgagcggcatggtcggggctagggggaaacagggccggatgaaaggcagctcggattgcaatcgcaggatcgcagaagaggcaaagagtcacacgggaaacagggggtggcggagcttaggagctcagtgatccgggtcaatggcgaaaatgcctcaactgcgaggggtaggagaaagaaggcgaaaaagaaaattggggctgttggatggagagggggagagcatggggactatatagaaccacgcacggggaggcataaggacaaagagcgctaaacctaaggggtcgaaactaaacctaagagagtaattcgcagtcctcatccgatatggtgtagtggctaacatcgccgtctctcacacggcagccgggggttcgattccccctatcggagtttcttttttgattcttttcttttttttccttgtctttatatcctagaaatgttagaaatgaaaacagttggtggaattggcatctcgttccaatcatttttggttcgaacaagaaactatatcagagtgccaaggcatattaacaaaacaaaacagagtaaaatacactcatacttgtcagatatatatcaaccatcaaccgagtgaatccagatatatttactccgtggagcaacttgcttcagtcgcatgatttgcgatgatctgcgcgtagaccgagattgttggaatatttaatccctagcagtcgaggatgttccttcggttgttgtggccgagaacaagggtctgaaggaaatgcgagaactgttcttgaagactcaatggtttggagacatggagcggaaatgtacaaagacaaagaacataaatccatacatagacgcatacgtaaacgtatttccgagtgatctctacttacttgcttgggtggacaataaggtctgcgagtaggactgggcctgggacaaatatcgggctagacgcaataaattccaccacataagtgcacattactatagtcaattgcaacggtcctttcgagctgtgcagcatgtgtatttcacgaaaacaagaagaagattacatggatgatgtgttttgctagccgagctagtctaggttagctaaaagtggtacatggtgataggatatatgagatctgaagatttagaagtgaatggccttagagtaggtggccatggcagcctccttgaaggcttcggagagagtggggtgggcgtggcaagtgcgggcaatgtcctcggaggaagcaccgtactcgatggcgagggtggcctcagcaatcatctcaccggcaccggggccgatgatgtggacaccgagaatgcggtcggtctcggcatcggcgatgaacttaacaagaccctcggtgtcgaggttggtcttggcgcgggagttggcgctgaaggggaaggtaccgacattgtacttgacaccggaagccttaatctcagcctcagtctggccaacccaagcgacctcggggtgggtgtacatgacgctggggatggcagcgtagttgacgtggccgtagccggtcttgatatattcgatggcggcaacggcctcctcctcggccttgtgggccagcatgggaccgaaggtgcagtcaccaatgacacggacgtggggaagcttcgtgcggtactcctggtcgataatcaggcggccacgctcatccttctcgattccaacctgctccaagttcaggccatcggtgtagggacgacggccaatagcgaccaggacaacgtcggcgtccaatgtctcctccttgccacccttggcagcctcaactttgagggaaatagtagaaccactgtcatcgccggacatgaccttggtgttggtcttgaatttaataccctgcttgccaaggatcttctgggcctgcttggagatctcggcgtccatgccggggccaccgatctggccgaggaactcaacaacagtgacctcagcgccgagacgggaccatacggaagcctataccacaatgttagcacgatctagcattcgaaactcattccgtagttaatacataccatctcaagaccgatgataccaccgccgatgacggtcatcttcttggggacctcggcgagagccaaagcaccagtgcttgagacaatgcgcttctcatcaatgttcaaaccggggaagccggtggcttcagagccggtggcgatgatgatgttcttagcacgcagggtcttctcaccaccgtcgttgaggacgaccttaacagtgttggcatcaacaaaagaaccggtacccttgatgtactcggcgccgttcttcttcagcaggaactcaacacccttagtcaggccttcaacagctgtgtccttggccttcatcatctgggtaaggttgagcttgacatcgccaacgtcaataccacgctttttggtatcgtgaaggacctggtggtagagatgggagttgttgaggagagacttagaagggatacagccgacgttcaaacaggtaccgccgagtgttccgcgcttctcgatacatgcggtctgccagggtgttcagttagtatgcggattgcgacggcaagaccgacctaatcaaaaattggaaagcctagggagaagtggttcttaccttgagaccctcttgaccggccttgatagcagcaacgtaaccggcgacaccaccaccgatgatgaccaggtcgtgatctattgctcgggaaagcggatatcagcaatcgcgtccggcaagaaaacagaacctctccgggtactccgggaactccgtgatggcgatgtgagcatcgacttacctgcttcagaagcgaaaccacgttttgagtggccaatgaagatcatgggagtaacgaaattgttgggaatagccctggagccggcatggcggaaggcagaccggggcgaagcccggggcaagacggcgcggaacataacgaaaagaagggacgaaaagattagtagtctttagatataaatgcaatcctcgatgtaggcggattggagttgttgggagtgcgcaaatagggtggtggtttagagcacgggaaatgactgagcttttgcggtattgcttggcctcaccgcctactacggaccatgccgcaaagctggcccgtattaccaaggcggtaagacgggccggcaccttgacggatgatctcgggatccgttcccgatgattctgcgggcagaatatctgacataggaatcgcccagacattttgattgaacttaatacgatgctaggagaaaggaacattcggtaggacctgcaacagtcgtcaagtcttctttgaatgacaaaaccccaggtattggtggtttgactcgggtcatggtaccgtctccttctgtccgccctggagaggactactccggggaacgcaatttgataagccactccctaagggctgaaagagttagcggcgattccccagagattcttttgcctacccgcggatcattctatcggcaagcagtctcggcgggctccgccgcaattataagcgcacacgaatccaatggattgtccgtaacgcagaccataactcttcgcacgggttgagaattgtgttctgacgttgatccctttatgcgagaacccacatttcaagagatgcgggtcccaattgaaccgggtaccgtgatataaaatgaagttctccagtgcttcttggcgctctttccaaccagcccttaatttttcacgacttgttttctatatccttgcagtttacaatacccatccatgcgctggtaaggtgctggaagagaaatggcacatcccggagaataaccatcctcaacaatgggtattcgtacatggcaataagaagccatggaaagagacattcagactgatacaaagctacatggcatagacaatgaaagcttctcgattgaagcgaaaattatacaccgttaatttgtaagtaagcgaggaattgagaaacaaagttcaaaaccatatcccaggtgtatcctctcgaccgattcgtgggttcatgagctcgtgcaacatatcaagacagatttagtcctgtccacaagacgatttctcctcctcctttcgatttctcttctgtcgccacttgattccactagccgccactatccacaagcaaggagaaacagcaatagagatcaaagcaagtgtggtgtacgcccagccctcgcccatggcagagcgcatagggctgattgctgctgacgccgcggcacccagctcacaccggaatagattgttcgctgcagtcgcggccgccgacttgcccggccagagatcgaccattaaggcattcagcacttgggaggtaccaatgatcgaccatccggtaatgaacaaaagaatgataggagcggcaaggttgaccttgtgacccagcacccagccgtaggtcagcatcgacacattgctaatatagtaaagcgggagtgcgacttccagtctcgcgcgctcgatgttgaagttgcgaatgtccgcacgcacattcttgacgatggtgagaccagcacgttttgcatggcggcggtagttccagtcgaccagtcggccggttgtgaaggctgaaagcacccctcctccgccgatggggaggtacatcaatgcagcatggaggtcgttgaagtgatagatcttgtggaaggaagtcgacgcaccggtcatgacagcatagaaaccagcaaacatcaatcctgtggtgatcaggaccactgacgtctcgatatccaggacaaccttcatagtcgggactggtgacgggaatcgaagggagtagttcttccgcacctcagcttccttgtccgggtcaggcaagagacccttctgtctgcgcgtgcgatgccggataatatctgccacagagttactcaaagggggcggtgggatggacccgtctccaacgacctttcgacaagtttccggtaggaatagaccgaggatgaggaagaacacgccaccgaagatgagcagaaaccagaagatccagtgccagttagtatactgactgagaaggccgccaatgatgggcgacaaagaaggacctaacatgcttccgactgaagcaaaggcgatatatgagcctcgctccgcggatgtgatcatgtctgcgaccaaaccgttcgccagggccacagtcccgctgctccctgcactctggagacatctgaggaccagcagggcagcatagctgttttggagacctagtcccaggttggctgcaaggtaaattgtgaagcaaatgatataagcgggacgacggccggcagtatccgagaatcctgcgatcaacataggtgccactccctgcataatctagagataaagtttatcagttgtgggtctctttaacaagattatatttcgtcgacttaccaggtaagtagtgactgtcaggttcacctgtgagacggagatattcagggaattcgcgatagtagtcaaggcaggcagatatatgctggaagacaagggtgagaagaaactggccaaggatcccatggcgacaatggcccgcttctgggctactgtgaactgggaatatccttccaggcgcgtgtctccatgctgggttgacggatcgggtgttttggtctcaacctcgtcaccgcgctcttgcgccatgttgcctttgtccatttgattcatgaggtcggggatttaactgaccatgtggtagaaccgtggaagatgcgtttgatgaaatatcccgatagttttgatacttgcccggtgcagggaagtcaaccaattagagtttgtcgtcaatcccgggaccggcatcgacctgaactcagccttatatcaggtgccttgctcttgccactatttagttcatgcaaccatatgtacaaccgtccttgtgttcatagatgccaggaacgacttgcttgcgataagtattcttttcttctttcttatggccttgaattttatatttactcaaacattctcgtgtagattagagactcgagtgttcaaagtacttgtacatatcgatcgcaatactatatctcgaagacaacatgacgatgcttgtgctcatggtcatatatacttcagctataggtcagcatgtactttcgagctatcatcattggaatagactcacaccggagcattagaagtataaatgatgtcatctctcatcacaaagacattgtttgcggagaagaatgacatcttggcaaatcaagatttgcggagacaaagcgattccggggccgcggagttggcttccgcgcaaactttccgctttctagaaaggaagaaccgagacaacggctgtgtacaaggatagacgaatctcggaagcaatcgaatcacacccggttatatggatgcacaaacagctgagtccccggacttcagcttttccgtattctcttttccttcttgagctccggtgcgatagttcgatttagttattgttcgtgaatcgcgattcaatacacagacacgaacttaaccaacgatgttgcaatactcctccccgagaagtacatatctattcccaaatgaggttcctaatgggaggcaggaacaagatgctactataacagactcgttagaagttgcagttggattcgtcttaattggctataacaatgtgttttgtgttgtagtcgagaacagtcaattctctttttccacgattctcccttattacggcagccatcggcattggagcccttctctcggtggttcctgtgtgcctcatacttccagaccaaagtgtacgatagcaccgacttctttgctcggttcaatctcacattttctagtgctttttctcaagtatatgggcgccgaaactgttagcaacgccgcagtctccaagtacgcggattggatcagggtccttcctaatgaccgttttcatcggtttttccattgccgacattgctggctggcctagctcagttgagtggatgcgatatctgctataaaatggatgttccgggtccgagccgacagcaaattagctagctgggttgttatcaggccaccacggccaagaactacggcgctgcctccaacactaacagagtcggcatttatgtcatataagcaagcctttctacaaattttctacttatttccccacaccgccggggctaggcggtgattaataccggcgttgcggacctggatgtggcgaaagccggccgtcccttcgctcactccgagggcaatacctgcaacattgccgaggggttcaaaagcaattgtatttttttttaacatcagtttcttcggaggctgtgagttctatctaaattacagtgaaagcgcattcactaacttctacagaagcttctagataattctcaaagggtgagacctgcgccagtctggccgacggtctggccgacggccgcaacgattgggtcaggtacaacccagatgcctttaaaaatgcttactggctggtgaaccgggccaagatctattcccgaacaactaaaccttggaacccgaggccggactgaataccgagctgaactatcatactttaccatgtgcctaacaaaagttgtatatacgtatgcttagggatctaggaaatgggacaagatatgagaacttctgacatcattcctccgcattttcggtctaatccccgtgaatgctagtacaaggtcgtcagggagaccaatctatataagtggacctggccgagcgccaaaacacgctaatcccgatttaggcaaaccggggactgatggatctctcgtacaactgttgtagatgacatccaatcataggcgagcctcccacgccaccaaagccaaaatcccagactggactgagaaatactctgagcgcccaaaagcggcatgccaggaccatccccgccgacccactcgagggaaaatgcggaggtcacagaaagccgtggcatcggataattgttcagagcggataatttcccaacttccttcacggactatgtagcgcccatcggttcgtactttcctttccggaccgagtctagcccgagcccaacgcaaacttaccgggacgtacagaagaacaatggctttcttcggattgccgatgtcagtacaacatcaatcgggtaaaagcccccagacttcgccccgccatggcagtcgtaccacacgcggtaggtactggccgagcccgcattctggccctgaaccccggttttcgcacgctggtggggggaggcccatgttgtatcggcgctggtgactggtttgctatctcgcgttccccatgttccaccggaatataaccgaattcgaaatgacactccttgcttttcagggctgcttttcggtcgatcccggggaggaggtgttgggcatcatcgtctattggtgattcggagtagtgccgtctatgtgaccaggaagtacgggatgcatgcaaaagctttaaaaacctcgggggatcgtctcttttttttttctctccgcacttttgatctcattttaccccacgggcaagggtctgcttatcttttctgctctttgttcctatctcggtctatacaactgtatctttaatgcgacaaaccttgaacactcgattcatccctctcgactgcgttcaaaatgtgtgacaaaatcccctcgtggaatgtcgtccatagactggagaagcgccagcttctcatcgggatcaactgcgtggctgctctgtctattttgttcttcggatacgaccaaggaatgatggccggtgtcaacaacgcaaaggattatattgatctcatgggattcggtcatacggagatagtggacggcgaggtcaccccggtggtcacgaattccctgctgcaaggtggcattgtgtctgtctactatttgggaacgctttttggcgcattgttcggtggctggctcggagaccggacgggaagaatcaagaccattgcagctggttctctatgggctatcctgggcgcagctctacagtgttcggcacagaaccataattggatgatttgcggtaagggaaatagggttcagtagatgcagacttggactaactttcgcagcgcgtttcgtcaatggtattggaaccggcattttgaatgctatcgttcctgtctgggctaccgagacggctgaacatacttcgcgcggacaattcattgctattgaattcacattgaatattttcggtgttgtcctggcttattggttggagttgtacgtaaatccctccgtttatgcgatgtctttctaatatccgatagtggcctgtctttcattgacaacggagagtcagccttccgctggagattccccatcgcattccagatcatcttcctcctaggtctctttggggctgtctggttcttccccgagtcacctcgatggctcgtcaaggtcggccgggaggaagaggctcgctacattctccagcgtctacgtggatctagcggagaggacctcctccgagcagaagccgagttccatgacatccaaagcatcgcagagctggagcggacaatgaatcatggcgactcatatctgtctatgcttgttgggtacaaatcgggagacctccacatcggccgtcgtgtacagttggtcatttggctacaggtcatgcaggaatgggttggtatcgcaggagttactgtctacgcaccgaccatctttggcatttccgggtttgattcgatgaagagtcaatggattagtggactgaacaatattttctacatggtatgtttcaaggttgagacaagactgagttgtgctaatgcgcatgtctagtttgctacgctaatctgtgtctttactcttgaccgcatcggtcgtcggtggactttgtattggggcgcggctgtccagggtattgccatgttccttgcgggtggattttcccgtctcgctatcgacaacaaggcagctggtgatatgggcaaggcatcctcgtatggtgctgccgcggcttcgatgattttcatctttacctctgcattcggagcttcgtggctcacagtcccttggtaggaaaccatcctgtgacctttttattcaatactaactcctgatccatagggtctacccggctgaaatcttccccctggccgttcgtgcacgtggaaacgcctttggagttgtcggatggagtattggaaatggatggctggtgagtgaacgcctttaaatgaatacaagaccgatatgctgacggaacgttaagactctactatgtcccgtcatgttcagcgccattggcgaaaagacactttacgtcttcgccgccagtaacgccctcgccattcccatggtgtgggctctatacccagaaagcaaccagcgcacgctagaggacatggatctactattcgcggccaagacgccctggacctgggatgcagagaagacctttgcgcgcctcaaggcagagaacccaggcatggtccagtctctcggtcccaagggcagtctgttggacccggagactggaaagcctctttctgttgctgcggctgttgcggcttccaaggctggtgataatgctgcaggagcggaacatgtagatcacgcttagatgagggaggacttgatgatgtggtgtttggtgatgtttgatgtttgatgaataaccaactaataaattagatggatgtatggctttagactgtgtatcttatccctagaatatcaaaagatcatgaaagaaagatgttattgaccgaaccactctgattggccacttcgagaacaacatccatcaactctacagttcgagcttacagccttttttcccctctgactatttctctctctccaaatattcattatcaacacaagtccctaccacatctcttcgcatcaacactcacgtggtaagtagcacaatcccaacgcgtcgcgtcgcaccgttcccggctaaatacaaaacaaaataaagatccaaaaaaggcctgcaacccaaaacccaagcggataacaacatataaaaaatctaccaacatcctacgttgtatacgaaagggtcgcataatcatgtccctctccgcccaacccgcagatccaaccccagacgagcaagacccccaaccccacaactctcctcaacccacattacccacagcgcaaaccaaaaaatatctccaccgcatatccctgcacccaacgctaaccccctaccgccggcgcgtgtaccgcacgctcctctccgtcccgccgggtcggtggaccacgtactcggcgatggcgacgtatctaggatccagtgcgcgggcggtcgggaacgcgatgcgcagtaacccctttgcgccgggggtgccgtgccatcgggttcttgcagcggatgggtcgttgggtgggtataaaggggagtggaaggttgatcggcataaaggtggtggtgggttttgcgaggagaagaggcttaggcttgaggaggagggggttgtttttttggatgggaaggttaggggggtttgttttaaggagtttgtggatttgggggctaagtgagtttttccttttgtgaagattagaggtgttcctgagttggtgttgatggttcaggctgtatatatcctgaaactgatttatggattcggtctgaatctcctacctgggtacctctatgtacggtggtgaagatccggagcgggaaggcctaggcgacactccagagcgatatgccagggccatgcgctattgcaccaaggaatacgagggcaatatgtcaaccagaatatgaacccattagacccctaacaattaccttggtttttgtagtggtctagtggtatagttaatacatcgtatttgctcaacacaatattttagacctggtcaaaggggctgttttccatgagaatcacgacgagctggttattgtaaaggatatagatgtttttcccaccatattgttcctttcactaaaaaggtacaagcttctacgttcagctctgccatacaacactgaccatgtgaggcagatgcacatcggttcggttacatccgcgatcgtcacttcctcggtctctctaaactggcccgtttggctgagatgttctctcacagactccatattcaggagcgcctgactaaacaggttgctcgagctatttctggggtactgaaaccgcaaggggtcagtattcttatgcaaccatcctacctttgtatggccatgcgtggtgtacagaaggtaggtaataccaccattactggctgcatgttgagatacatgcaatcacgtgcaatagatagggaagaattcttggaactcttgcatagaacgtagctaatccttacccatcggagatgctttggctacattacgtacatccactgtcacaaccgtttgaagcataataagtaaattattaggattcgacaatacctactttgggtgctccctaaagacgtcccgatatcccagcgcttctgccttcccttcaacgagcgaagaaagattagccacaatctggtcaatatactcctgtatccacgtactttggaagatacgggaatattctatattacacgtaaggcaatgttgtgtggcatgttaagtatgcaatatgcgaaaaatttcccgcggatggtgcgataaacccaataatattttgggatcatatgtatattgcgaggcaattgccattttctgacgtggcaccaattgacgcaatgtcccaactacccctgtttaccggtagctttgaccggctattgaagaatctcccaatgtgcgcttttcctttttcggtagtataaacagagtagtgttttaattcaattaggaactagatcagcaacctgagcgtccagcatggaatcacatctgctcggtatctctcaagcactttactagacagccctagatcagtcatcctctcatgtatggatgacgagcctttgaatgaggaggaaaattttgcgtactgttttggaatcagccctgtcgtattcagatgttttcttgttatgttattcattggatgaatcctcacaacgttgcctggctgataatctgttccatagatttgagtttcatcttaccctttatactacctgcgcatctataacggcgcttacaataggcctgtcttgatatttttcagccgtgagttcgtagtgcttactttgcatcgaggcagatgactgggtcacgagctgtgtgcgtcagtctgtaatattcgattttagatatatatgtacgtctacaaatcttagtgtagtgcacgtaatgtaagtctgcttgtataagcttatcaccgctcgttcagtcattagtataaatctacgcctccttccggtcttccacagtcttttgatatgcatgcatcatctattaccgctctttgtctgtacctagagtgagcctatgaatcccggtcatgggcgatactgacgagctcgaattgtttcgccgacggtggcgcgaggagctcttaattgaatcggaccgcagggcttctcctgctgcggctttggcctcaactgccccgcctcggaccaagaaaaaaatgtctattacgacatgttcgatgtatcaagatcttcacgatgaggtgtcgagcttgctagccgaggtagatcttcattatcagtttttcgaggaagatgatgagacgaaatgcactcgaatgcgtgacacaaatattatgggccgttttgtgtgcaaccaaagagcatgcaagtccaaaggatggtctagcaacaagatcgctgtcacaattcgtctttatccagagcaaaagtacaatgccagggtataccaccaacgctgcaaagcttgcagctcgctgagccggccggttttggatcagtcatacgccgagagaatcgtttactggattaaacaatggaacggaattcgggtagagaggcctccattctcccacgaaagaagaggtcctcataacagtcagctttgtgaggggtgtagagctgggcactgctcccaatctggggaggactgggctatccggctagaaatgtttgtctccccaaccaatacatatgactgatttactaattgattgccaggttgactctatagcgagccggaggtctatggttgattgcaggattataaactgtcagaatctggaatgaataccgtcatttgttcatccttgatacagatgggtcacgtaattgacaagtttggtttttctggcgaaaacatactcactcatttcattttgtttgttcttgattactgagttattgtccacaagattgtcattttcccggactagtgtcatcttagagagtgagagatgttattgagattattctgccacgtatacactcgcattaccaccgtttttctgtcacaaagccataaatgagcgcattggcaaggacagcatgtgacgcgaaatatccatacgtcagttgctgactacacacaattttcgttagttagtactaaaaccagactatctaaggtagctgatgtttaatgacagctattatttgcaattggaaaattgatttacctggttctcaaggtatcgttccagctctgctatgatccgcatgctaactctaaaccccattatcaacttctatgttaccgggaggttgtcgtctaaattatacatgtatgtctttccacaacccgtcggcatctgaatgttggaacgtcaatgtgagggctcgatatataggcatagaagacaagtcttaccactgctatgatgtttttttccatgctcatttcgaacatttccagctgatagctacgtggctgaagatcgaccatatttgagaaaacgtggataagtccaatatgcggcaacaggagtgattcgatgcctctgactgctggcagttacgattttttaatcttctggggtcgaatgcagtttgttacttatggtctgcttttcgcgcgcgatatgtgatcacgatgcatatgatacatcaaatctgcactcccggtgccaaacttcctccgagaataaccaatcacgttctgcgacgtggatatgcgctgttctatgcaagagtgtctagtcggccagattcacggtttgctggggatgacacattttcctttcgccaatatggccatatttctatacataatgaacaactgatgccaaacctcgcctttgcctaattcaataaccgttacatctggcaccttatcacaatcatcttctttatcttattattcgtacactcgacatgagcaaggattctgtggaattcattcgaaagctagtcgcttgtccagaattaaccgagtcggacatagacgttgcgctaaccgctgctggagtagacgaacttctcccggatggaaacagaaaattatcccaattgggcttggcggcgaccgggttcttgattgattccagcattgcctttattacgttatctcgaggtatccattgacaatctgttgcgagtcttcccaaactgacaccctcgagattttacatcgaagctcaaatcccgtgtcaacggtatccaacaccgtgcagacattgcaaagcgtactggcatcgacaagcacttgaaatttgattgtcggactggtgctcgctcgtccggcgttcttgctatagcgacaagcgccctcatcggagctatatacctcaggaaaaaatgtttcatgtccgtggccaagggactttactctctagggtaggtctactctagtaaccccaggaataaatccctaattgcgcacagcgtcctagacgagcaccttgaccagctcaacttaatggaaatattcaaagacgagcagagaaatccgctgcttttgccttccttggtggagagtgattctgcccagactagcgaaatctggagtcaagatattcccccttggccggattttccgaccactccggatctagggggtttgtctaactatgaaagactttacaatgagaatggattattgaaagatatccttccagatggactttctttcaccgactcgcgttcgcagtctcctttagctgacgacccaggccaacgggcgttagagaggcaggtccttgggatttgtcatcctattgcgtatcaagaaatgcaccatggaagaccccatgaggtagaaatcccgcctgaacaagctgaacagcatgctcttcctcgcagaatgtacgatcacctctctattagcgttgacttgtaccagccagatggcttctcaggccagcccgcgaaccaacggtcctcaagtcagcatttcccacgcaagcgagaaaacgctagtggtatggaagtacaaaagagaaagtctagatgtgttgatattgaattccgatcatcactgtgtcgagaagctgaattgactcgggctctgggtttgccgccccccggagatacttatttcaggcccaaaattgaggacaagatactgagtctcggttcagagatcttttccagtctaagtacctttttaattctggttggtggctctcaatcacttgttactcttcgggcggccctaaaatacacgagagagctgggggaccaaggccctatcgttcaaaggcgaagatgggtatcacgtgagctgaccattcacgaacgcttcgaaatcatcggcgaaattcaagacaacgcggcatttctccagatcttgcgatgtaaccatatcctgcatttctaccgatgcacctgcagtccggtggagcgcacctcaaaattcatagagttagcgtccaaggatgagctcattggccagccgagagcaagaggcaatccgaggaagatggaagtggctaaagtcgtcaacgaaatgatgagggatgttttcccagacctggagcctaactcagctgtttacaagagcaagcgccgaaaaatgttgggatttcgaaaatttggacaacgcctacacattctagcggactgctttggggatgctgttctaagcatacttcatttcgatcggtccggtgacgtggcgggccctgtgattatcgaaaaaatgtgagtctatatcactatgaaatcgtggcgaaatgtaaactgaccatgcaagtattcttgctccgtcggatgaggcatttgaaacttttgtgaaggtcctcgaagaatcgcaaggaagtcttcttcgggagattagcaaggcagccgagcaagctttcaatcatattctttatgaggatatgaagcggcaaaatctttttgctttagaaacactggcaccggaagagatcctgaagtttccaaaaggctcgcaagagctcagaaatctcttgcaatagtcacgtttcctttcgaaagagcaagaaaaggcgaactgttgctttcgggacacggtgaggaggaagggattcgtacgtgatagcaagtttgcagatctattttcatattgtattgaattaaatcagcgctctgtaaaaagaaaggggtacatcgagacgccgccaatagccagtctttaaatacgctactaactaagcgttgaacagcaaacgttctttccttatttctagcacggagactacccacctcatatgtgatacaactggctaccgtatctctccacagtacattccacagtgcgtatggtgaatttcttttcccgttaattgagactatgtgggaaacttggatatatcaagtaatggtgtgacaataaaagctggtggtgcattgacatggtacatatgcgacctagcgaatgcaaacaatgctccgtccactatcccatgtaatccttttcctaatcataaccttgaagggttcattttggaaattcatgatattgccgtcctctccaacgagatgcgctgatggagcgaacacaatcgcctcgccagttcggagcctggcaattcgagagagaccttttttagcactgtcggcctgatgtggagctatttcaccacccatcggaacatgcttttcgatcgtcttgtaccattgagggctcgtaaatcggtggattacggtcaacgagcagaggtcgatcagctggggcgagatcgtcggctcttgagtggaaataattatacgcacacccaagtgtcgctgctggcggataatggtaaggaaagtctcggtaagcgcctttgcagcgagggtgtcggccatatactgcccgctgatgttaatgaataataaccaggatacttcaatatgaacaattcaccttatgggcctcatcggccacgatcatcttccctcgggaagggtgagcgtagaggaacaagtcgatggcgatacggaatagaatgcaagcagtgctttggtcgacgaaagggcacgacaagtccaggatagtgacaccgccgtcaataaagtagtcacttgtgtccgtgccagcaaggtcgagataagagtcaagcaggtctaatctttgatatagaaaaggagtctgagaacggtcaagtttgagtgcgttcagacggccccggaagtcagaataatcgaagtagccgccgctctccatcgccatttcccgaaggatccgagtaacctgtgccatgtagagggggagactgccagattgagaaacagacataagcgaaagcatcatgcttatgttgaggtgcttaggttgaagtttgaacggtcgaatctcgatattgggaatctgggagtacatgcccctgagattagaaatgtttgtgggagagactaggacgcgcagtgggaccggcggtgcatgagcatattgcggtagaacactagctaggaaggcggcttcgctgggctgcgagctcgttattgatgtatactcgtcaaactgcagcacaagagtcgatatagactggtttagggttcccaatgctggcagcctcatagagcaattttctaaggtaatatcaatgactggtgccctatgggtagaattcgaaacataccgatcatgcaagcagtggtgtgcgacttgccactcccttgcacgccgcagataaaggcagagaatggaatattcgcattcaacattattctgcaatctggggattcattccctctgacaatgtttccgagcagcatacattgagaagggagaaaatatccgaacttttctaacaagggagataccaggatggcatgctcattaagtatagcatccattgcttcttccctttgttcttcactggagctcaggaattgacactgtgcctctagggaggggaaggacggagaggcccccgtttccctcgcatggagatcgccggcaaggtggtccttgaattctattagaactttagaataccgcaaagtcagacacaaaaaggatggaagagaaagctctaccttgtagacggatattgactatgcggccaatatcattgtcgatgaccgagttcgccgcctcatagttatcgaggcctgcatcgaggtggctctgagactgttgacctgtacctatatagagcgcgttagccaaggccatttatgttgtaccgtccctctaatattttctgagatataccggatgatagaggatgctggccctgaccttggagacgggaccgctgtgaaagagtgggagcggacagtggtatgttttggacttgagctgatcctgaggtttcgatttgattgttgcttctcgacaacaaatcgagttcattcgcatagcttaggctctctttaggaactgtatatataggtaacagcgctgtacttacctgtccacaaatgccctgataaaatcagcatgattcgggctctttcccaaatattttttcttgatcgcttctcgattgatcggctggttttgtagatgacgactataaatagagtcaccaatcgccttctcgaggagagcctcagtccaatttttagattttcgtgccatttttgatagatactccaggggatgaaaagaagcctgatgaaacgatgctagaagacgaattagcagtgtacatgggggacataattatagcagtgcaaaagacggttgcagggtatgggggtattggtgcttttagtcacacggagtcacaaaagccatgattctactgcagccaaacctacaaattacttgaacgctagcgccaagtgatctaagtatgtatgtatgcatccttgctgtcactagacgttcaaggtgagtgcaggcaaacccggctgtcaaatttggtccacatatctcttactgcgacttaggctgtgcccgctcgtttggtatggtgcggtggctaaaacttaccaattcacgccatacctaggtaattcatgtgacgatgcatgcaccaacatgcaaagagcccgacggagcgcgacaagcggcgctcggttcggcgaatccagtaagggttactttggagagtggatgttgggaactatcaggcagcctaggcttagcctggccgttcccttttaggtattatagacatggtaatgttttaattccaagttgatttccaatgaacttggccgtccgtataggcacttcggagctaattccgacggtgcggcttggttcctgatctacaccagttccatatcacacagcatctgaacctttacgtctggcttccacaactcggacaagttaccggttcagcccctatcaacctgaactagatcagaagctcttctgattttctggcgtagtggcgaatgcgcaaatccagcccttgttatatgcacggccgcatggtcgcatggaaggctccgtttcgatcgtattggtatttcaagtaaagtacaaagtcataaatcatgtgacttttgcttataatactaattgtcatctgggatgaatactccctagccttttccgaggcaagaaaagaggatctacgtgtatgaggtgaaactgatttcgaacgcgtgtgtagctttctaatattggtcgggtaagttctgatgctcatgtgccatctggcaaaaagccggacccgcttggttagaatgaaaacagtgtagacagatcccaatccgactcgtcaaatcatccaaaccatagcgaatggacattcgatattcaggcacaaaatgcttgtatccatatctgcattcaacacttgattcctctggaattggatcgggcatcctatttgctcgctcgatagcctcggcgacgacaaacaaggaagtcggccaaagattctgtgcctcgagtagttttatgtaggcaaatgcgtatttgcttgtccatccacatctgtggacacacccaagagcattgatccctccaatcagaatctctcccaacttcagcctcgcgaagcccctttgctcttctagcagacctaaattgaatggtcagtcacaggtgggtcatttcacatcggttgaaacttacagaacactctgtcgcccaaaattgacctgacatcttcgctcaaaagggcaaggtaagagtcaccgtagttgagaaccagggcctttgtaatatctctgaatgcttgtgcgttcttaaacaagctcgctgcggccgcaagaacaataagatcactggctcccttattaacaggagatagccagaattcactggcaaaagttaaagcgtcaacaacgccgaatttgttcgctgcgacagcaattctaagaacatcatttacagccatgacctgaggtagcaatctgttctgatggtgcaaaattgcacaaatacatctcagcgccatcgcattctcttcgggcagtattatttccacgggaagacccgtgacgagtatatgattttccttccagtctggccctaagatagtacctggtagtttcgaggctgccttgaggaaaattgacttcacgcggagcctcagcttttcaggtccaacaactagaatgatatcaccagctgcatcgatattcacaatcttgtcccgcgtgtctgtcatttcgaattgattggattatgcttcgcaaaaaaaaaaactgctctaaccaaagggtgcacgtaaagtgatagcctctgaccaaggaatcaattagcaatcaggttaggtgttactgggcacgggcagtctttaagcaaatattggaatgggatataaaaacaaaagacaagggcaagtgaggtttggtttaccttcaaatcgagcgtagacaaatttgaattggtgagtgccccaaaaaaggttcaaaagataacttgtgggacataaaggtataaaaggggacttcgagatcgttgacaagctctggtaaaacgaagtaataggaatcaggaaccccgatataggctgttcgttgtctccgcgtgctgactttttttcttcagcaatgctcaagacaacaccacgaagtgccaaaatataagtcctgcaaagcagctttttccgtgggatttcgtccgcttgcgacaacttgtaataagccccaaatcgcgactagttcgcttgagtgttcaaaggggggaataggtgcataataagccacagattcgtgcattcagttaatctctaattagcccctccgttggtgccaacacattggcaggggtcgggagtgaattgcaacgtgtctgagctgcaatacatactgtagagaacttttggaacgcgatcatgatagaaggaaatagaagcagaaatatcgtcaaagtgacgtgtacaatgatgggcggattaattgctgtcgaccttctattagtttgacgcatatactggtgtgttattcccatgcattggcttgccttgcttgatcgcctccacgtctgattgggcagcttcgcatacttaggcaatacgttcgttcttataatactgcatgtgcttaggcatccgcttcgcaaaaaaaataaatactcactacatttatgagaacagaaatggtggtccatggaccaatataaaatttagaatggtaaattgacagggaacagttggcccaactatttatccaaacttgtccagtcacacgataagttctttgctctaaacttagcactataatgtttaatcatgatgcacaggcactatttcctagccgccagcataagagacagcctttgggtattgtcgatttctcaaagtgtgtgggagatagaaagtctgccagctttactaatgctaaactgcctgctaattcataagtcattgatagccaacacataatgtatccgtagtagatatatcatatgtacaaccgctgtgtctgttaatgaggatacgtggatacgtagaagatgtgtatgtttggtgccttgttcgccaataatggagatatattaactagcttttcaagtctcttcttcttgccgctcgtggatgaaacagttatgggtagctgctccagctctatagtatactctgctcaatgggggttctgggtttggtaatctgttctggggtgttcatgttccgattcagagtcactaatcataacttcctcgggcgattcgatggaattgtaagggtctcggacattgcttcatgattttgttgtactttagctccgactgcatcgtctaaatctaatggcgtggccagtgtacgtaacatcctagcgtgagtccttttcccttaccgagccctctgatcccaacgaagcgccgacaagtatcagaacccttggtgagaatccacacttttttattcggttgttccctgaggctttggctttcctccgattcaccggcaatttcagtgaccaaagttctaggcatctcgaacgcagttataggagtaaaaagtgccggtagagcgcttaaaagctagacttcgatcacttcggtgcgggcttacagctggtcgaatgttagaatgggaccgctaatttttagcgcctcttgtcatccagcttatgtaacgaccaggtgatgctcatttatgattatgtaatactaagggtcgtgctcagttttactcagtgcgcaaaaagcggcaaggcctagatatcgatatttcgatgtggaatgactccaatagcgtgacaatccccagcagctctttgtcagatgattataatccagacgaacctgggtcagttccaaatgcttagaaccactagccaatttccggttggctccgagggctgaggctagtgataactgcgtaatggagtgaacagtggaccctgcgatatgcttttgactggtatatctgcagctttccgtctagtgtttgccggattcaaccccggacccgactcacagagaccaggttacgccggcttggacacgttcgagtttcaaccgaatatgcagtccagagcacacgaggtggtttgaccttttcatagaggtctatatactgaaccaatgtcactttgtaggaagtagttgaagcttggtgatagttcataggattggcgatgcaaatgcaccagaactataggccagttgttcgataggtatcttgcgagtatgcggcgatatctactatacacactgtgctgttttatacttccagcgataagcacaacacccggtttcttgcaccctccagatgtctctccaagtcgcgggtctttgctgaaacatccagtccctcctgtttctagtgcatgcgccgggaatacacctacaaccagacatcaatggtgtgaacacgatctatacaccgactacacaaaaacaacaccagagaccggcgtcacgcgagagttctggctcgatatagaccaagcaacactagcaccagacggccgatcaagatgggacctaaccatcaacggctccctaccaggcccaaccctcgaagtcaactggggcgacgaggtagtcatccacctccgcaacagcctccccaacaccgtccacaacggcacaagtctacatatccacggcctccgccaacactacacaaaccccatggacggggtagtctccgtcacgcagtgccccgtcccaccgggatatacaatgacctatcgatggcgcgcaacacaatacggcacaacatggtaccattcgcacataggtttgcagacctgggagggcgtgtacggaggtctgatcatccacgggccggctagtagtaactacgacgaagataaaggcgtcatacagctctccgactgggatatcaacacagtcgaccagctctggcacggagcagagacagtcgggtcgccggtgctggacaatgccctcatcaacggcgtcaatgtctttgggaatgacagtgacccgagtcagacggggtaccgtttcaacacctcgttcacgcccgggaagtcgtatcggctccgtgtgacgaatgtcgcctgcgatacgcacttcaagtttagcattgatcaccacattctcacggtcattgctatggatctggttcctatacagccgtataataccacagccgtgagcctggcgattggtaagctttcccttcataccaacgaaccaaccgaaggatacatctaaccaatcgaaaaggacagcgctacgatgtaatagtgcacgcagaccaagcctcaacagccaaatccttctggctccgcgccgtcccacaactctcctgctcagcgaacagcaacgcggacaacatccgcggcataatctactacacccatactgacaaaccaaaccaaccaacccttccaacaacagcagcctacaacctaacagacacctgcgaagacgaacccgcctcaaaccttaccccgataatctcaacacccctcatcctcacagcagaagactccttctacaacgaaaccctctccgcaaccgccgcgctaacgagccacaccgtctaccgctggtacctaaacagcacctcgatgcaagggaaatgggcccagcccacgctgcgcaatttcagcgccgaaagcagcatagccgataaaccggcggtgatagcaattccacaggcagatttgtgggttcttgtcgttatcgaaacgagtatggatattgcacatccgatccacctgcacggacatgattttttggttgttgcgcagggatatgggtcctgggatggctccacgtctacatctaaatcttacgctaaatctacagcccgggatcagggtacgagcaccggtctgaatctcgacttcgcagccggcgcactcccgaaacgcgatacggcgctgctgcccgggatggggtatttggttcttgcgttccggtcggataatccgggcgcgtggctgatgcattgtcatattgggtggcatcttgatcaggggtttgcgttgcagtttgttgaacggggggaggagattgaggggtttttggggggtcgtgctgttggtggggctggtgcggattggagggggtttggggatggtctggagaggaattgtcgggcttgggatttgtatcatcggggaaataatgttttggaggatggggctgggatttaatttgcttttgcgttatgaaatgaactcttggtacctgcatgtagggattattttggattaattaattaatagtacggagtagactagttacatttagggcatgcattttaggtgtacaaaggacaaagaaaagacaagtctgaaatttcaatcgagtttttctttgctttttctatttagtttctttgtattctagggatattaggatgctcgatatctcgtatttagaaaaacaaatacgaagctgcagctactatcacagagtggagtatacaaccctagagatgtaggacctacttagtccggttagtccgagcgactactgcagcacacgtactttaggggaaattcactagcaaagaaaggggaaatgctaggtagataggaaaagccgtccaggccaatgaagaaaaaaaaaatagtatatcgtaatcgtcgccattcattgaaccatcccacctaaacataacacatctaagccatctgatctagaatctaaaacacatgagcgatcagctcgaaaaatacaaaaacaaaaacataatccgaagaagcgatgcgcatcttctatacaagaccgattcataaccagaatgcgatctaaggaaaaacaggagtgggaatgggaaataagcaaaacagaaaagaaaaggaaatacagtcatgatatcatatcgtaaacaagcccgagggccagaaggtaaaaggtaggaaacagcgcaagaagaaagaaaaaaagaaaaaaagaatgcagaaggcatcacactcatgagatttgcttcgcagagcgcttgcaggcaccgcgcttgggtacgtccatgtggtggtacgagcgcaggtgctcgacgaggtggtcctggcgcgggaagccattgctacccttccgcgagcagtgctcgacggggcaattgcggaagacgggatagtggacgctggactggtggcgcttcaagtctgcgaagcgggtgaaggacttgccgcagttgtcgcagccaaagggcttagctggtctggtggggagatgttagttggttcaaggcgacagcacgcgcgacggtagatggatggtcggcttacttggatgccggcgctggcgattccgcgttggattcgtattcgctgatggggtaggttggtagcgcgatgtcttcggaggggaaggtgaagctgctgctgtagctactgctgtagctgctgccacagctgctgggtgtgctctggggcatggtgggtcggtcaaagaccgggtaatcgtgtggggtttggtaggtgtagggtgagctggtgacgttgtatagttctggggcgacctcttgcatagggaagggactggttgcgtcgaggtcgcagagggaatcgtagacgggctggccgccgtagaagaagaagtccatgctgcccggcgaggaggagtaggaggaagagtaggagtctgggtagttgaatggggactgcatgttgatgttgatcggggaggagagggagcgatgggtgggaattggaattgcagtcttatagagagagagagagggttagtctaaaatctgccatgcgaactaaagtcaagtcacctaccattgtaagaggtaaactaattatgttgtaaaggttaaaattgatttggcccagtatttattcaaatgcaaaataatttccccccgttaatggagacatcagcccttttatgtgcccaacacgaaactgcatggcagggggtgttagggtattggccaacacgggacactaacaacttctagaaaccttctcgaagcagactggacgacaccactcagcctcggggatttgctgatcttttgctaacgccgaatattccacggcccttctagcgtgtccttcccccccctctcatttcacgtaaccaacggtgattggcggaggatccggtgtcgaagccaacgaggtcagttagttggctgcgataagcagttgggtgcccagagagtttccccctcacgccgatcctctcatgattggccgttggcgggttctgtgcgtcttccgtgtgtcttctgtgtgttctagtgtcattctagcgtgccaagaactcgtgtctgacatgtttttttggttttgttttgttttgtttccgtttcatgtgttgcatgatgtagtgctttgtgttggaagtaattgtattcgggctgaagtcagagactcagagcaatatcaattcaatatcaacttcaatatcaatatcaaagtccacttcaactcaactcaaccagctcaactccacttcgactgcccaactccagacatccaacctggtattgacgtatatcggcacaacggcacaatcgtgccaattacatcaccggatcaagatccagccttaacccgaacatctccattctccatctccacggagaacttggtcgtctaatattcccacaattcccaaacccctccaatccggggtcagagatcgaccgatgatgtcgcggtcgcgcacagccctgacgtagcatctactgactagcgttcgcatatccccggcttctagaaaggacaaatcccgcgctcgagctgaaagagcccatgcatgcaacccgtaatgtatagttacggagtactccgtaactagccccagcgaaatgattcgtcatatgtcgctcttttgattttctttattcgatttattctcagtcggggatacatgacattgcttccggtcgtgttgttgggcaaccttggacttggcttttatgagccccgttgcctttttcctttttcctttttccgatttccggtttttgtcgcatctcgggcttatactgatatatttttttcgctattggcttgcatgcacttgcatatctcctgcattattgtcccgggatgggaaacagtactccgtagacctgcagacctacgtgtccacgagcaaatacgataaccccggacgatcatacggagttcccggggtatggaattaggtacttatgatatctgctgatccagggcctggcccgtacccgtacctgcaaggcagactgcgcataagcatgctatgcactggacttggctacttggttacttggctgagccacttgcctacttctgtaatatgcttgacttaaggattcattgtattcgaacaattgataaccttggaaataacacgaaactcccgtatcaccgaggcccattcattgcactcattgatgccagtcctgcgaaaacagtaaaagaagagaaaacacgcccaccgagaccccacagtttccagagtacccgccatagcctcaaccatccagtctatcgaaccatagccgcaaagccaccgatagtgtaaacgaatccagggtgaaaagcaatcatctgcacttggagacccgaatgggtggctcacgagtaaaaaaaaaaaaaaaccaaagacgcctcataactcgtcctcgaggtatttgtacacaaacttgaaatcagccttgcgccgattcatcctgttgttattcgtaagtggtgagctcgtcaagtgggtgagcaaaacgaaatcagtcggattctttaactgaccatgtgctttcgtagtcgaagaagcgataggtgccttgttcaaactcctcggtaatgttcttcggctcctcgtgacgctggaaccaggtttgatactgcttgtggaagcgccagctctggttgcggagcgccttggccgcgagatattgctggtacgtcccttggcggtagtagaaaaggtagaagagggtatccgtgtcgattctcccggtatcgtacaaccgagggtcatcgaatattggaagaggttcctgtggatagtagagcgcagtgctgtaggggttttgcggcttgtagtgacgtggcttttcggcatcgccagcctcgggacaggtcgtcaaagaggtagcgagaaggcgctggaccgacggcgacgggttggccgacgcacgggacttggtcacctcaaatgattggagcaggtcctggagaccggggggcaggtggtagatcgattcctcactttcggtttcttctgtctctagtttaccgttcgttgatgtctccgcctttgcaggcgcgggcgataagacacttgcactcacagggaccttgggtcggacgtgcccagcgagctcttctgtaacggcggctacagtgggtgggattattgacttcataacaggctgtactgacgccacactgggcgaagcagtggaagacttggagataggtagtgccacggacagagccgggctgaaacccggtgggggtgggagagggagaatgccaacaccacttttgtcacttgctgcggcagcggcagcggcagaggcatacttgagggtttcaccagggggacgggtcggaaggggagcaggcttcatgcccggagcactcgaggaagcagaggggtggagggtagcaagaacaggaagcggggatttcatctgtgtggacggtcttcgggctgctggcgcttcttgcttgaccttgggtttcggttcgggctcttcgtcttggattgattgcgcgtcttgtgatgatacacgatcaccttcgccgcccatgccaaattgtgcctcgatctcctcgccgatatttagatcgtcgtagagtgtttcatcttcgccggagtagtcaagactgccgccttcttcgacgtaatatttgatactttccttgagatcttgtaccgcacccacgtccaggttgccgttctgtaaagaacgattgaggaattccaacttgttgacgtgccatttatgtcgttccgtaatatgggagatgtcggccagtcgatctgccttcttcgtatccttcttccctttcttcatttgtgcatgaagtgtttcctcctctgcttccaaggcctcgatcttcagctgaagctcgtcaaccatggtggagagaaactcggaacactcgactctctccttctccttggggtcaagtcgcgaagctgccgagagaccttccttggaatatgctttcgtcttcatttccttttcgacggctttgaattgttccatgcactaccgacaatgttagcttgctgtcctcaaccattggactctgcgggggaccaagataggaaacccagacataccacttcaatcgctttgcgctgctccatgagtggggctttatctttgacctcgttcccagcagcccatgacttgatctgatcacggaatctttgaagcttcttgatctcgcgcttaaggtggtcttcgagcttatcccgttgcgtaggattcgtagcctggcggatcttctcgtaaatgccttcaaacgtttgtatcccttcggagaccttcttgaaggttttttcaatttcctgttgtgtttttcgggctgccattgtgaacccggtggtggactgtgccgtcctggcgtcggattaatgcggtcggaacggggagatgatgcgctttcgaccgaaatggtcacaagtacgaaattaaggtagttggtgaaggaagaattgtgggaagaagggtttgtttgacagtaagagggacacaggctcggaagtccatggaatacctctccgcgtttaagtggaaagcttcgtggatgctctaataggtaggcggtcacgggcggaggcaaacgtgagggcggcgcgagggggattgtgggcgttagacacacaagtcgctcgtcgcatttcaatttctcagtgggaaagaacacaacttaccacaaagaaaccagtcgcgctgacaaactgcgtcaaacgagctcattttggcaataccacgcatttgctgccagcgctatcaccagccttatctaccgcaactgcgtaccccggctttagaagctgtctctcattttgacacatacaagatctgttggaaatcaagatgaaaggtgaggatctctgtacctatactatatacaaatcaactcaccccgttcagtcatcatccaaagagtcaaatcggcatccgtgacagtcgattcggagctagtctcctctattggcaagggccttcttgtatttgctggcgttggcaaagaggataccgagaaggaagcagagaatatcgtgaaaaagatactgaaggccaagttctggcccgatgagaatggggtacaagtaagtcaatggctatcaggtgtgagaccggcaattgacatatcacagtggaaaaagaatgttcaggagattgagggagaagtactatgtggtatggctcttcatcttactctccagaccactgctgaacatgactagtctcccaattcaccctctatgcaaaaatgaagaaaggcaacaaacccgactttcatgatgcagctggccctgaagctgcacgcagaatctatgacttcttttatgacaagatgcgggaaggttatactccagaccgggtcaaaaatggtgtcttccaagccatgatggaggtcgaattgaagaacgacgggccggtgggtgtgaactactgcagcgaggacgcggcggtacattttgaccttccagttcctttcctcgccttcattgattatatactgacttggtttcattctaggtcacaatcgaaatcaataccaatcttcccaaaaaggaacccaaggagcagaaaaatgacgacaaggataaacaggacatcaagggatcttttgaattccaaattcccccagaattgctgcagtgaaaaaaaagaaggagagaaacaaaggaagattaatagagattagagtaatgctttgtacttaaacgttagcagatacccccaatgcaacttctatacaatcccgtggtccaaatatagttggggtcaatggaagcttcctgaaccacaagcgccggactcccccacaacgccgacttctctctcctccacttctctaccatatcaccttcatttctctctcgtattctttttcacctttgaaatttcttccccgaaactccacagtcatggcgaaacctcagcgtacgttcagtgcggggtccatctgcccgcggatgcaataattgagtcgagtcgctgacaagctcgtaggctctcgtgtcttctttgacattcaaatcggtgacggcaagcctagccgggttgcctttgagctggtaagttgcccgcatcctctatatgccgagtctggattgcatctaacatccgggtgttgcacagttcaacgatggtacgacatgattttctcccttgacatttcggacctgactaacagcaacagtcgtccccaagaccgcggacaacttccgagctttgtgtaccggcgagaagggcattggcacccagggcaaggaattgacctacaaaggtacgtctacaataccccgctcccatcgcgctgacgcccactaaccgcggtgtcccgatctaggctcaattttccaccgtgtgatcaagcagttcatgattcagggtggtgacttcaccgcgttcaacggcaccggcggcgagtcgatttacggcgaaaagttccccgacgagaatttcgacctcaagcatgaccgccccttcctgctctccatggccaactccggccccggcaccaacggcagtcaattcttcgtcaccaccgttcccactccccaccttgatggcaagcacgtcgtgttcggtgaggtcatcaacggcaagaacgtgattcgcaagatcgagaatatgaagacccagtccgacaagcccatccaggacgtgaccatcgtgaactgcggcgagcttaccggcgaggactacgagaacgcggccaagcgccaggcggacgcgacgggcgacccatacgaggacttcaccgaggaccaccagggcgaggagcttactgcgcctctctgcttcaagatcgcttccgacctcaagggtttcggaaacgctgctttcaagagtggcgatctcaacctgggtctcgacaagtaccagaagggtctgcgctatctgaatgagttccccgatcccgcagacaatgaccccaaggagctgggcgagcagatgaaggcactccgattcaccctgcactccaactcttccctgcttggtaacaagctccagaagtaccgccaggctcagaactgggccacatatgcgctccaagtcgccgatgaggctaaggttaaggatgctgatagggccaaggcttactaccgccgcgctgttgcccacgagggtctgaaggaggaggatgctgcgctgaaggatctgcacgaggcagagaagctggctccgggcgatgctggtattatcaacgagatcgccaaggtcaagaaggctgtcaaggaccgggaggccaaggacaaggcggctgccaagaagttcttctcttaaacggtttgaaattgattcatcccggcctttcttttgttccatcacgattcacgacgtggtcttctcgttcaacaatgacccatgatgtatgatatcacatcattcaagcaatttgccttgctcttgtgcgaagtccatactgtaacttctttttacatagtagactcctgtcgcatagcacgttaggctcaggtgtaggattactcaaatcatcggggataaaagttgccccaaaagtatcaaattatatatttccaagtatgacctggtagtaacgcactcatattttctagacggagcattgcaaccaggtctaggcgacccgctatactaatgataagcattagcctgtgtttcagaatatattggctactgcttcagtcttgtcgatcatatgttttggatcacgcctagtatcgccttaggcgtttcaagtcctttctcttcattttctgctcggattttaaaaatcaggcaatgagcaatgcagatatccactatcggacgttttatctgagacacagttggggctgatttaggtggcaaccagatatcgtagtcaaccgtgactggcagactacacagaaccttctgattggaggccaggtggacaaatatcggaaaagccaagaacaatcacatataaacagatcgattgaaatatccaactaaaccaaacttatatatccaacttctcccttcattcccatcctacttggactcaaaagcgcaagttcccatctctagcttgaccacatccgcctcaggccgaatatcgaaatcaaagatatccatcggcaccgaaagcgtggtacaagcattcggaatatccacaatgccggcaatatgcccctgcaccggcgcgcagctgagcagcaaatatatctgataatcactatagccatagcgccggagatactccataacccggagacaggtctgtctataggcgactgtcgcatccaggaaatgctgcttgccatgctcgtcgacagagaatccctcgaacgtcaggtatcgcccagggccgaactgcggctctacaggtcctgcgtggaatattggtgacttcatggctagtttcgccatgccgtctttgatgacggtgaacttcaatgtgatcacaccggccatttcaatcgccccgcagaatgagatctcgccatcgccttgcgagaagtgcaggtctccgacggagaatttggcgccggggacgtgcacgggaaggtagactttcgatccccgggagaggttcttgatatcgcagttacctccgtgctcggggcggccctagtaaacgtgtgagttttggttcggttttggggtatattgtcatctctcactgggatggttcgagcaccctcattcgcgatcttgctcttcgcgtcatcaatagcactgcctgcatgggcattctggggattcggtggttgagcgacaatttgatcggcaatagtattggctgcaatgagttcgccctctcgacgattccattcagccagaacttcggccgagggagcacatcccagtattccggggtgaatcagtcccgcaaaccgaacgtgcggaatatgccgggatgagcagaagattccttcaaagtcccagatcgcctttgctctgcgatgccgttagcatggatacatgttatgatattacatataattaacatacgcctcgggatacagtcggtctaggaaacctcctccattctctttgtggaatatcccggtgaatccccacggctggtcttcgaatggctggacatcctggatctcgacgagcaagacatcgccaggctccgcggtttcgatgtcgaatggaccagagaggtaatggatttgggttagatctacattcctgatatcgtctgctgagtcgttgtttccgatctggcctccggtccaatcgagacattcgatcttgacgacttcattgttggcgatttttccatgagccggaactggacgtggaattagcatgcatgtctctaatgggaatatgatcaagggacataccatctggatgccatctgttctataaggaacttagcaatatcttacgacttcaagaacgcaagaacatacatgtaagccgggctgttcccacgcaggcttgtcgaggtcgacctttagagcagtacggattcccttgatacccatatttgcttttatccaagggtttgttagttgttcgacgtggttgaggcagtggctgtaggctaacaagagtataatctcgggctttggacaagctgggacccttaaatagactgccatatcccggcccctcttacgataaggtcttgccccgcagacacccggtccattgacatgttggcgtgaataacagttacgtgaggcgttggagaactggcttatcgctttatctcgcagatcaccccgacctcggggggtctgataagcttgtacttatgtacccctcagggacaattggagatgaaatgtatttttgtaaacaaggcctatttcggagggcaacaatgcggggatggtcgccttatatgctaataattgatggtgtctgtgcaatcgcaaggccatatatgctcgaaaaatacttgccgtgaagtcttagtgctgacagctctcaagaaaacctctttccaggagagataggttccttctggtctggctcgtccgtgtcgacattgagtttgtcaagattatcgagagataagcgcaagaaatcatgcttgttcttccaggtaatctggctttccgcgaaacctgtactctcagcaggaggtggaggcgggtcggttatcttggtgacaaggtacgctgtagatgcctcagcaacgccatacatcagcacaccaatgtacgggatacgcagagcaaccgtgaaagcaaaggcaaagccaaagagaacaccttctcgatcgctgaaccaccggcgcttttggtcgggggtgaacttaatgcgccaaaagtagggttcgagctagagactgttaggataattcaagtgcggaagggtaacttgacttacaagctcacgcatcagactgcgtgaagcaaagtaggtgtgaagaaaagtgacaatgtaatgcttcggcagaatcaaccctatgccaaaaatgacagccgcgggggtggagccgatgtggcttcgcaatgtgtagaaacttgctgcaggcataacaaaccgaccgatgatcgcaaccatcgaaagaagatagacaccaagcattataccaatcttctttgcatagcggttgaagaatgacttcagtgctttggcaattggtcgagaaacgctggagccacctttggcagagtactggacaagattggggtagtatagagagcggaggtgacgggggtcttcggatttatgtttctggatgtatgtagtgtccacccattgaatggactgcatgaaactagtgagacggtcagcgaagtatcaataagttggttgctaagagaatgtacatttcatctagggtgggcgtcacatatcgcatcaaggtcatgagcaagaatggcacctgtaggacagacttggacataaattccaacccactgagaagcttttcgtcccagactgcctgttcaaggttgatcacccatgatacgaggtatatagagaatttcacgctgaggatcttgagttcaagtcagcgaaaaccctccgtgcggggcagtatagaaacatactggaatctgaatgatcaattggataacgatgccgatggctatcgcaagagctgcttggcggaaatggtcgtacttgaatagttcagggtttcctaatgcacgaacagctgcaaccctcagttagtaatggcctagaacgcgttcccatccaggggatcattccaaggcaaatgacaagatgtggctggttcaatgcagcacaagcacctgatcaatgttttggcatagccgactccaacgttgatagaatttcttgtgtagcctggaatccgccaaggtattccaacctaattcccctggacgttcggggtaaacacatggggtgacatactgcctactattgtgagctgaaagccgcggatcacagcgttcggctcgaagttcgacatcgttgctttcaatgctgtggaagaaccaagtaaataccaccacgtataaccccagaagtgtcgaaacagttaagaatctagcaacaacgcattcttgaaaatgagaccaaaaataactgtgggtgcctgctcagctggcattgaaagctgcgtcatgatcacctgatctcggcctaaggcaacagtgcatctccccgcgcaataggccgcgcaactgcagataagccccatctcctgcgtctcctgcatcggatacctggcttctcacattggtattctgtacaaacatgtttgtacattaatatctcctttgccccttatcgatcgcatccatgaaccatgcccgagtctccaagtgagctacactctctccgccgctctgccacccttccaaccaaattaaatcctctcgcccgacgtcgccccagcctgcccgaaaaacccccannnnnnnnnnnnnnnnnnnnnnnnnnnnnnnnnnnnnnnnnnnnnnnnnnnnnnnnnnnnnnnnnnnnnnnnnnnnnnnnnnnnnnnnnnnnnnnnnnnnnnnnnnnnnnnnnnnnnnnnnnnnnnnnnnnnnnnnnnnnnnnncccgcgcgacggggcgcgagcgtgccgaatacccccgaacatgtaattttctatcacccatccgcgaaaatcgttcatttctccccaagagccctcgcccctatcccatccagttctacgccgtccgacttcgactacccggtcgatactatcgagacactcccttggcgctctgcaactgagcgaacggtcgcaacagcgccactgaggttagagaaggtccatggctcgacagcgtttctgaaatgtggaaatgttgtccacgcaattctgaagaattcgcagtgttggtgtgtcgacggggtatcgaagtttgttctacgcattcgccctcttacatactatcgcatcgaaataccatacgagacagaagagcaccggagtttggtgcgggatctgaagatcgcattgccaacagtgcttcgatatgaagtcactccatgccctttcaaacgctctttcagcgttgagctcccgaacgacgcaatggcacctcggcgcaaaaaggcttggcaaccgaaagatcagagagaaagagtaccgaccgtcctagaacctccacgagagacaccatcaccctcttcaataaggtcggattgtctcgattccgccagtgccggggatgacaccgacggagacctaaccgatgacagttgtttcacttcaaacaaagcgagcagtacaattttggagactattcccgacgatcgggcatcctctcccgttgaggctttgagtccttctccataccaagggcctcctaggcggtcggtgactgaagtaccgcaaactttcactagcctgcttgcaaagtttgaggctacgtcaggcgcagacgatgaatacgatattgatcctttgctcaagccagaatgcgcatctagtactgatgctgcacttcaaattgatcatgagctcaaggttacagaccaactcgaacctgagtttgtagccgatagtggagttgaagccggacctgaatccgaagctgtcctagattctgaaatcaaagccgaagcggagcttgagatcaagtctgaactccttttagaagctatatcaccagccgaacccttcaaggaatctgcagttgaagccgaacccagcatcccaattgagactgacgcagtgttggcggctgaaacttcagacgaagttgtattccgtgctgaaactaccagtgcagtggggactaaggcagtgctggaagacaatctcgtgaatgtcgaagaagttcaacgcgtgcaacccactgccaagctcacactggaggtcgaccatgatgcatcctttgcgtccagtcccgagtcattccattctgctgagccacaatcgccggattcagtctctactcatcctacatctgtgggaggccccgatttgcctgaatcagaagagatttccaacctttcgagcataaagcacattatttctggattggaagcgtcagcggatcagtgtaagatgccacagcccccaacactcggtattcctcaaagcgacaacgttcccaatccaaccagcttgcttcatcctccatcaatgcatagcataagctcgaataatgtgcctaggcgcttcgcagatgcgttcgcagacacctcaccctcaatggcccctacaaacaatggacaccgacccagtcgttttacggatgtatctgcggacacggaaccgcggccaaacattcgtgccaaggtcgctgctttgaacactgatctcgaccacatgagttccgagttccggcgccgggcaaaagccacaagagagcgtgacgtttcccctatgcctcattcttcggcattgtaccagccatctagtgatggctcatcatttatttccaaggctatcaccttagtattgatccccccggcctatctttttgtcattctccttcatatcgctgcgcgcattgtcatccacccaaccattcagccgactatcagctccccaccgagtgaaccaaattctcattctcagccaaaaaagaaggatccagccacagaggatgacttcagctttccactggaacctcaaacttcctcggaatatgaggatgctgaactcttcagaaaactcgacccttgggatctggactagttgggtggttgaaatgcccccttttaatttgcttgctctttttttcttcttctggatcttcgtcatcctacgctcggtttaatgcttactctttgtattcctccctctttacaccatcttaatgtttctcttgttatgatatttggcgctgattttgcacgactcatgggtggatatatgacatggtttgtattctactgaacttctgtattctagcgttacgtgtatcattgaggtgaaatccggggtcatgtcagaaacgaataattaattgacacaaatacgctctttcaatttccagacggttctattccatccaacgccattgaccctctactgaatctgaccgaagtcgtcagagatgaaacctacgaataggggcatgcccaactgtaatgctataagccgttcatttcttttcccgtcccacaggactcgtataaacagacacgcccgtgagccacaagcgtaggggaatatgtacacttgataggaaattcgcattgaaaaagcgagaagaagaagccagaaccaccatcgaacgccagctaatgcatgagaaaacgaagccatgacacacctcgcttgccaggtccaagtacacaaagacgaagatgccatttgggaaatagaccgaagagcaaatctatgcttttgtgaccttagcagctccgcccttggtcttggccttgcggcctcggcgatctcgcttcttcaacccagtcattcctgtcttgcagacctcggcatagcgaacgtagaaggcctcaatatcatcggggctgacaatcgtcgagagcttgacctttgatgcccttttcatgctgatcttggttgcctcgcttgcattcttggggttcggtgtattggtgtttccatcagttgctcggatgaggatagatggttgggagtttgtggtagtggcgccgggcacatcgatgagaggtttttgagtgagattgaccgagccatgaagattttgggaggttttggagagcagatctgcaagagatttgaagaactaaagatgatcggtgttagcgatatagctcggaactggtggtcgtggtcgcatgcgcggaggtgtagcggtcaggtaaacaccaatatcaatatttacctcgtcgtgtcccaaatgtggggccatatttagagatcttttatgagccgcgcgataattaaatgatccgaaagctggagcagatgatcaatatacagttgacagctgggcacaactcacagtgggggagaaactccgctgtgggtgcctctccgcctttgttttggggcagcagaaaagtgaaaaaagttgtctaccgcccggcgtacctgatagagacatttgaactcttcaagagcagacgaaacatcccagaggaccaagatgcccaaaataccccgccctcggcataatacgacggccttgcctcgggatctgcgatccgagctcggaatccgcgatgtctacggtgacaagaagcgccgcctcaatggacctgcctcgcgcaaagaacgccgccaaaatgagcgtacgcagaagaaatcccgacatgcagccccgccgaacaagaagaccttggagcatccgcagcagcgacttcagcagaaacctcgacagcaggatcaggaggaaagcgacgaggacgaggatctcgatgatatggatctcgacgagggtcccagtgtgcagacaaagtccaaatccacgaaagacgccgcgaagaagcccaaatctattctgaagaaagcagcagtcaagcaagactcagagtccgagtccgagtccgggttcgggtcagaaatcgacctcaatgaggacgaggatgaggatgaagatgacgagtctgaagatgagtccgaagatgagtctgaagacgattctgaagatgacatcttcgaggatgaacccaaagaaaccgaagcccacatcccaggatcggtcaagtctaaattggcgcaagacgatgctgagattgctgcattggagaaaaagcttggcctcaagaaaggaggtaaactaccaaaggcgtttgaggaggatggactagacgagttgctaggggatctgggtggcggcggcgatggctcagaggacgagagcaaaaagcgcaaacgagaagccgatgaatggctacgaagtaagagactcaaggccaagagcttgcaaacccaacaactcgaaaaagacgacagtgaaatggatagcgctgaggatttcgatctcgacgacgaaatatttggaggcgatgacgccgaaggcagtgattttgatggtttcgacgaggaagaacgcaaagaaccaaaaaagaaagaaaacccatatatcgccccggtcacgaagcccgaacccaccgctcagaagtatatcccaccttcattacgaggtcgctccgacccggaaagcgaatctctcactcgtctcaagcgccaggcccagggacatctcaacaagttgtccgaggccaatatgctctcgattgttgccgaatttgagaagctttaccgcgattacccgcgccaacacgtcacatctaccttgatcagcctgctaatgggtctaatttgtgagagggctgcccttcaggacaccttcctcattttgcatgctggtttcattgcggcattgtataagctcatgggaatggacgttggcgcggagattatccaaactgttgtcgaaactttggatgcagatggcgacgagcgtggaaagttccagggaaaagaagctactaacctggtctctcttctctcgcaactttacaacttccacgtcatcggttcttccttgatgtttgactacgttcgtcttttcgtgcaggagatcacggaatcgaacaccgaactcttgcttaaggtgattcggagtaagtgatatacctagcccacgataaagctactagccatctaacatgtcgcagattctggccctcaactccgactcgatgacccgtctgcactcaaggatatcgtattgctcattcagcctgccatcacaaaagtcggcgaggaccgtctgtctgttcgaacaaagttcatgatcgacctgatcacggatttgaaaaacaaccgctcgaaggcttcagctgcagctggtgcaggtatcaccacagaacatattaccaaaatgcgcaagattttgggttccctaaacaactcgcggacgattcgcgcatccgaacctattaacatttcccgtgaagatatccacaactcctctaagaagggcaagtggtggttggtcggcgcaagctggaaggatgatccccttgtgacagcacagcgagagatggctggtgtacaaatgccccaacctcaggtcgaggatgatgacagtgacggcgaacctgactttggagtcctcgcccgagctcaccgcatgaacacagacgttcgtcggtcgatttttgttgctatcatgtctgccaatgacttccaagatgcgaatgtccgactcatgaaactccgtcttaagcgggcacaagagtttgaaatcccccgtgttctcttgcactgtgccatggaggaggaggcctataacccctactattctctgattgcgcgtcggatttgcggtgaacagggtcgacgcatcaaagtgtcctttatgtttgctctttggaatatgttcaagaagatgggtgagcgaggcgatattgacgaagacgaagacaacgatttcgatccggacgatgaagaaaacggtgttagcatgaagtccgtggtcaatctggccaagatgttcagcgccctcatcatggacggcagcttgacattgagcattttgaagaatctcaacttcgcctatctgcagcccaagactaagacgtttgttgaagtcttgatcatcagcatcattcaacaatctcaaaagtccaagacgaagaagaaatccaagaggtccacgccagatgagcctgagaagaatgaagcggctttgatgcaaatcttcctacgtgtcaaggagacaccgcacattgccaagggccttatcttttttgtgcgaaaggttgtcgcaaagagtgatatcgtgtctcccgaggaactaaaactagtccggtggggatgcaatgtggctacagatgcccttaaggctgtggcggactaaaagttgcattggattcatcttgcaattgcatatagaatatacccaatttgttacgctgctcctgatttgtttatgttccacgcttgtcccgaacttcgaaatcgccattgctcatttcaacaagagaagaatgaatcagtgatgtactctgtaccccgtacggagtacaaatccagcatttccaatgttcacctatcctacttctactgttcgaaatatatgaaatttctgggctagacttccaaataagacggtaaacagaactggtggaatagtaaagcgaacttgttgagcatttccctccacgaggagttctgcataccgtcattacaattccgatatcgggttgtttattgttggatgaacctaaatcatctcttttgcctggaaaaatgttggtcgttgagatttgggtgtttcacatggaccaagggaactttatgttgtcgggacataaatcataagccatgataagaacttgtatgtaagtctatgaaatataatggaagggaaatgatacacctcccttataccgatataaatcgccgttagtcattcagctgctccaatgaggtcccattccatggctatgagccagccctcttttgtctctagagatccgccattgtcagatggaccacgctccgaaacgtaaccagatacctgaccaggtgaccgacgttcgtaggagtcattcccgagctccaaactccagttgagccctttgtgaatccccactaaatccccttttcgcagttggggtgttgtaattgcatcagaacgcgagggattttgacgcacgacggatttagatcgggaagttcccataatcatgatattcaagacagaatcaggatttctcccttgtatatgattcccagtaagtagttccgcttgaagaaaggccagagagccacagccactcatagatgactggctgacatgaataacacgcgcagttaggagatatgcattcggcttttccggcgagtctgaggcctggcccaagggaggttttggtagctggtcacgtttcgtccccatttctaagatccaaccgcgtgcctcagcggccattccgccagggatgtaattggacacaccggctcggtttcgaccacggcgatgcagtgtgcgcgaggaaggagagaagggtgcagggatgtcctctgcatccggattcggcgacggcgagcgaggcaaaacaaaaaccggttttcgtctctcagacggcgatatgcccggttcgtctagtttgaatctgggcgcggactggctgctgggaggcctcgccgccgaggaaagcataaatcgaggacgactgcggaatggtgttttcatattgcttggggtcgatgcggcttgtgcaaatagacatgcactcggtgcgggatttctctccatacccatgtcccatgccgtagtgctttgcctgcttttatcagataaagcgatgggatcggctggaggatccacggattcgggtggtgatgacaatattggatcgatatgtgtcagatttcttcgatgggagggtgccaccccctctacacgacgccgtttattcccatccctgaccggcgaaaacagcgcgtcgaactcagcgtccaggattcccggagtctctgcttcttcggggggagtgctgtttatggcatcgtctggtagttcgtccgcatctctccctccggtttgcacatctcctatgcctgcggcatcatcagagtcctcaatcacgtcgcgttgttgacgcgagccgggggcagtttgggtaacaggcaggttactcgcgactttacgcgttgaagatggcccgtcatcatctatgagatcaagatcatcatcttccttctgtgcgacactttgtgatagtagaaaccggggtgtggaggcgaactgagggccactgcggcgcgtggatgggttgcgacgggcgaggcggaatggtgatggagtctgtggccagtcacattagcctggggattcgataaatcacgccgtagacatactgccgggaaaggcatttatctaaagtatcagaattatggagcgaacaccatggcgctgcttcaatgcacccagtcggatagatctgtagttaactactccgtacataaaaagcggactgatttctcaggcatgtaaacccgcttgtgaattagctactaaacctatttaggaagtaagttagagcttcagttcatatattcttcactccaggcattcctccttcttttatcttcttttaccaatttctaatatctgagctctgcaacacaaccttgcatctgacatctctttctttttttccctttcttaaactcaagtctcaagtgttcacaactcggctcgtccttcttgtcctcgctcctatctttgacctaactatcagatccctgctcttgtggcctgtgatactaagacaccatcctataatgttttcaagcaaaaggcgacgacctaacaaagaataatgaacgtgatcctcgacttacaagatcaagcgcacaagctctccttctcccagctaaaggcgtcaattgcagttctcgcatcaacaattcaaggtgatcagtccgagctaccgacggttgcaatttctcctttgaatctcagtgatgtccaagttatgctcaagttgaaacattcactgagcaaccttgagttccgcaacaaacctccggttgggctgtctccgatctgtggtacgtatcccttagggaatattcaaaataaatcagtttactctcacttatctttcaacttctaagaggtattatactgattaatcgtcacttattgagctatatatagataaaattcagagaaatccaataagagttatagagatcagtttgtttgcaaagtggtcagcatcagtcattctgcacgtgacttatctgagcatgatcactgatctaaacccgtgctgacatctaacgactcagtgaggctgagcctcggcaccctcataagagcggcggcagcacaatcaaatatgaaagccccaccccagctccggtatgtataatgacataagtctactgaatgtagacgcaggtgaacagtaacaaccaatggatataactacctgacgaattatcaattagggctcttaaatgatatcgatattccgatcggcgcgacttggcattaaaagatttcctaccttttttacctgtatccctgaccgcacatttggcctgtcctgtgaagagggatcctagatttgtcaatatgaagtaatctaaattaagggaattgttgctcgtactagatgcttagattttcagtacagccttcctactttggtcgagtacctgccttaacacttgcttctccctactgctctcttaccgcttccaaatttgtacgcggcaaagtacggcagaaatttggcagaattatgagtggtaccagatcaggaaggcggcattggaatttcaggccgcggctgtgagcattagtttctcatgattttggagcccataggataaaaccccttggtcatgtgacatacacacacgaggttatgatttaattgcttcgctttgctccgccattactccgtactgatactaaggataaactttcgcacctaatcgtgtcgtgtgttggcgcctggcaagtacgttatgtacacacatgtatggttgagatagctgtcttaccgccccctctgtcccacataacgagagtttctcacaaaacgagagtttctcacaaaacgagagtttctcacaaaacgagagtttctcacaaaacgagagatttctctttttaggtatctttcatatggtatacccatacaaaaggtacataaacatgaattagagattttgtcacttctaggaatacttacaaaaaatatggtaggtgatatatagtctaaaggaggtctattttatttactattaatatattaggaagaaatattgagtattctccaagtggtagaacgttgatgtttctatatacatctctttcgtaagtctttacttttctgtataagatatctgaaatttattttattagccaattagtttaactataaatttattattgatttatactcttatttctcctttaactagccaaagggtcgagaacatgatatgaggtatatgtaccttttgtatgggtatgccatattaaagatacctaaaaagagaaatctctcgttttgtgggacagacccacccgccgttgatagggtggagccggtcttattcttgtaatgccaagatcggaaaatcgatatcatttaatagccctaattgatgattcgtcaggtaaatcgttggaggagtaattctacggcagatcttctactttctagttatatattaatagagtattaatcttcttcatatccattatcgattcttttcataatccgaattgatcattcgtctggtagttatatccgctggatcgggtcgttactgttgacctgcatctacttgcatgctgtctgggctactttgtcagggctactttcgaattacgagtattaaaacttacttatttaaacccttcccagctcatagaacttggacatgatctctctttggaatatacccatcttccaaagctttctctatatcgacttctcattgtctttgtggcttgattcatttgctttttgtcaattcctttcgtcatgacacgcgctttttccaacgaccatctcgaatctttccctgttgagagttatggtctacctcacagtatggcccatgctcaaaatacaccccaaggcacacttcactatctcgaacaggacctcccatttcaaagttctgtctatggtcttccatgggccttgaatgacttcgacctaaacatgccaattacatcggcacaagccaacatcgagtctcttactggatctgttagagacaacgcctccccattcggagcagagaacacaacgaatagtgcctggatggactgtgacagctctgctttggatggctatcagcaggggctcttttcgctcccagcgggagaaccattgaatgagacaccctgtgagggcagtccgactgatgaccgaacgtctcgtaggcgtcgctctaaacccaacgccaagtgagttcctccgatacagatctctacccctatcccatatctgtgtttatctaatcaatcaatcctccaaaggagcagcactggtcctgtcacatgtggttgggaaggttgcacatacacactcccgttcactcatgtgatatcgttgtggcggcatatcaaggacaagcacatattccctgatgcgttcaagtgtccctctccacaatgtggaaaggcatatggtcgaaaggacaagttgcagcggcatttgcgatcgcatgcagacgcggaaggtagaggtaaatgtcgttcgtgccatacatgatagtacaaaggttattgataatctcttgtctcttttttttaattttgtacttcattttcttaataaatcattcttttatacggtcctaggagtttctctagagggtaaatggcgaatgttaggtagtttagatatcttctctaaaatcgtttccagatattctagatataatgtagcctttacgatgcttagcacaaaacaaggtggagggcccaaacgaggcactggaaaccgtgaaacataattccacatagctgaaaggaaaattgtgacgtaggggggaacagaaccggagaaattagactttattagtcaacctgtggtcactagttaactagttaccaagttactcttctaccctcccatttattttaccctttgtccccatctccaagatacctgccatggattcatcaatagaatatctcaccgatcttgaaggaacacaggtcacgtttgatgccgttgcagaaccaccgttcgagttccctgcccagacatggatgatacttgagaagcttgaggaagagtcgaatcgcctgacaatcgaggacattgtcgcggagctcggaccctcagacaccgcggggaagttcctatgccgacctgccggtgaggaagacgataacaggcgcgcatttttgcgcatttatcaacagattcctattgctggaactgaaacgaagaaggccgccatacggggtcgccaggccgtcgatacccctcccgaccactcagaactgattgctttccagacattcacagagctaggttgtgacgttgttccccgactgctaggctatcaacagcgccagcaagaccacgacgagggtgttcctgggggatacatcacgtatattctatgggaaaaagtgcccggcgagtctcttaacttgaccggattctggaggctatcctttgccgatcgccaagccatccgcgataaatttcgtcaagtctatgagtatgattgattatctagtgaccactgcgaaatattgggctaacagagagcagaaggtttttgccgtgcgggtacatgccatgtatggctggtccgtcgaaaatcatttatgacaagtccagtggtcaaatgtatgtctatgcaagattatctatggactatgatctaactatctctaggcacatctgcgggtttaaatccgcatctccatttgacgaacctcaacagtgggatgatgttaactacttccaatacggattaatccaaccctccgatagcccgttctactgggaaggaacaccacccggaacggcggattggatcaaagatgccaacggctggacgtggtgaatatgaaagaaaaaaacacagcgggatacagtatgaagtattatctggcttagtagaaaaacgcaaagggattgttgttggtgtaatgaaggctgtgtttgctatacacaagtatgggcagtatactatgatcaacgtcatatggtatttaatgcgaggattggaaatcggcccctgggtttcagcaatggtagcaagatacgactaatgatagtctcatttattttcatgtgtggtccgaaggccataagtatacaaaaagcccatgcaaacacatgtgccaaatccagtaaaaatataaagaacgagcttacatcttctgaaagtattcatcgaaatcatccgcagcgactttagcgcagtcaaagccgtagatctcacgctgcacatcggcatcagcccacttatcaggcacaggacccttgccagcgcggagggcagcaaactgcttgtcacgctcctccttggcagcaccttcacccaagtgcagggcacgaccagaagcggtagccatgtcaaccaaagcctcagcacggctcttgcggactctctcgtaaacacggagagccttgttgatagactggggagtggtatcagggagtttggaaagaaccacaccgagaacagctccgtcttcaatcgcctgggcagcaccctgagccaagtgcggtagggtagggtggcaagcatcaccaaccaaggcgacagagtcgagaacccaagtcgggagcgggtcgtggacgcgcagcttccactcgcagacctcgccctcgggaacgtaatctagcaggcgctggaccatggggcagaagtcagagaagacgtccatcatggcaggcttggagcccttggtggtataggtagcgtttgtcgcagatgcgaagtggctgtcgggctgggtggtggagaggttgtagatggtattgttagagacggggtaggcgataatatgacgtttttcgccaatccagcgggtcacacggttgctgtttatgagggctaaaagctcggggtcgtctttgatttgctccttgtggatcatgattcgatacgcggcttggtgggtgtccttgacgccaacgtcggcacccccccccctcatcctccccccccgnnnnnnnnnnnnnnnnnnnnnnnnnnnnnnnnnnnnnnnnnnnnnnnnnnnnnnnnnnnnnnnnnnnnnnnnnnnnnnnnnnnnnnnnnnnnnnnnnnnnnnnnnnnnnnnnnnnnnnnnnnnnnnnnnnnnnnnnnnnnnnnnnnnnnnnnnnnnntgctcgggccggccgggccggcccccccccgcttcatcatctccacgcgggtggcactcttaataccgtctgcggcgagaagcacatcgcactcgaccttgaacggagcagctccctcggcgcggggggtagctgtgaatgatggccgaggaccgaaagagtccacgtcatctgcgctgactccgaagtggaacttgatttcgggatgttgcttgcagccattgtatagtccattggatagtgatgcacgatggccaaccatgtgcttatatccatatgtcttttcaatgtaccgcagatccacatatgcgtgttgagtgtccgttgcgccgtctgcagacatagattagatcgcattacattgtttggttgggaaatcgcaacataccacgaactgatgtgtcctcaatattcacagcctcggcctcaatgcccttccagacaccgagtctatccaaaatgcgggccatgttcggtgctaattgaataccagcgccaacaaagccgaggtcagttgcgctttcataaacatcaatgttcttaaatccctgctgtgccagagccaaagcggaagtcaaaccgcccattccggcgcccagaatggcgatttgtaaatcttgaggtgctgttgtcattttatcggtggtgtgcgaagaagatatatagtaatgggtgttaacacgacaaggaactaaaatataccaaaggaagaatagcaggaaaagcagcgaagaatggcacaaagagtccctttaaagataaaatatccaacggtgcaatgcccgggtgatgctgccgaccatgtcttgcattttgcttcatggccacggcggagtaagtctttcccgcctctcccacattctccccacaagcccgttttgaaggcgctcacacggcttggggatttcatcattccctgcttggactttatccgctttaaaatttgatggcaatgttgtaagcgggaggctatcccgatgtcaacgtcaagtgcagctcatcgtcgtactgcagtcagccttattctcatggccaaatcagcaggggttttagacccacagctttgctttgttcctgcttttccttatacgattaacccaccctgaacaaccttgatatgtgtggaatcggtgtcgatgttcacctcctattctcagctccaattctccatgataacgaacatccttccccacagtttttaactccggacttaccccgggccgctcatcttgcggagaaagtctggttgctgaggctacaaactgccgataacttcttgttggacactgaggtaagaataaacatctgacaatcgaatcattctctgatatgagttaacgggaatggccattgcatgaaccgcctaagattaactacaacaagaatactcggccgtgtttgcggcttctgtcattcaaaacgacgtgatccagttagtcttctcagatctctgtcttctcacggtcgttaatttttataggcaaacggccgaaaaagagaaaattaatttgcgaaacgacttttctgtatgacctttgacttcagtcatggcttatttgtcaccaaacatgtggtctggaaacgtcgctagtaatggcgacacaatgacgtgcggtctcctaaccgtcggtagaagacgtgatagatcaatgatacagggagagagaggtaaatgaatatctatcaacatccatggatggtaaagatcgcatggcgaaggctcacgtatacagagaatcaaggaaaggactagaccccactcacagtagtgcgccatgttgggactagcgcatatcgaagtatgagtgtatgtcgtcgtgtatatagggaatagtgatcaatgagagagttatgttcccatggcacacttgtagagaggacctgcttatatagctggccgctccgtaactggcaaacaacatcacgatgacccgtacagtcatggatcgtatgagaggactggcggacttttgtttcgcgagtctcctcaaccttcacatattcttttgctgtattaatccgttattttgaaaaaaatatgggactttccgggggcatattttcattactcgtcaccccctaccaggttaagaaacgattttggcgagctcaagtagcgccttgctatcgagttatttattgccgagcacgctctgcgtgaacagacgcagcgcgaggaaacgctaaaccatagagctatagctttacaaaaggccatagctatcgatcccgatcccgaccccgatagaactcaacttgaaattagagaagcagatgaacagctcgaaaaggtaaaaagacaacgtccaaaaaaagagcaaggcctttaccgagcggtgtccatgcttagaccgacttggagagccgtttatgatagcataaaggatgatgatgatggtatatggtttatgtgtgaagaaatggttcaggattgctcggatcgaggcggatgttgtagccgggggtgtggatgctgtgcacggaggaggcatctctctaaaggggagaaaggcaagggccactgtacttcggagtgctggtgctgtatcagctgccgaggcttcgaccttcccgaggaagaaaaggaagagatcgcaagctatatgaagcgctggcttgaggaattttcctcgccttatcttcttaatatggcaaatgcttttttctgtccattaaagccgaaggtaaaatcaaagccgaaggcagaatcacagtccacgttacggagactatttgaaagagggtgaaactgacgttttaagtctcatgaaaaacatactttacttcagagatatttgctcgctatatctccccttagcaatttctcggttacttcggcacgacccaattggattatgtggttgtctagcattcaaataccgtttttatcattgaattatctctaatattggtggtactcgaattaatatggatagcttcatggtgccatatcatggtatggtcgtaagtcttgtgtttggttgacaagaccaacatgatgaagtggacgtggccctatatgcgaattcttgacgccggtcagaaacttgatcctatcgtatataatatcccgttactctatatgcactccttagaaatttctagatatacgagatcttcacctgattggcaagagctattaatatctccattgaaatgtgattgagctgcccttactgcttctatcttttttccaccatattttggaccgcgctgtttccggacgtattcgtgtctgcaggcaaacctggtccgctggcagaagccgcaaggtaaaagtccgttgcagcgtatgagtggcacggtacttttttgaacaacatcgtggtttcgtcttcatatacagacactagtaagagatccaaaaaggcggcaagatggagaatttgatctcaattctttcaaataatagaaacttcccatgaaacggactaatatacaaaccaacgtaacaaaatacaaccccccaaaaacaaaatcaaaaccaaaaccaaacaaaaatccgggtgccgaccctaatgtataaaagagaaaaggcagggaggatgggaataagcggatccactattcatgtgggtgtatgatagaaagtagcggcaaatacttctaatacctatagaataccttagtaacctgattttttttttatagtagagagcaaaattagactagtatagaaggaaaaaaatccggtgaggaccagtattatttttcttagtataatatataatgaagagggaaatgcacgatgggcagcctggccatgcaggcaagacgagaatgacacaacaataccaaccatccaggacggtcagctagtaagcatagggatcacatagaccacacatagtatacaatcgcctaatgcacaaacatatcgccacttgcttctcatttctggagtggtgatctgattaggttcctctctctccaaaactgtacttgacaaccgggcactcgcttttctctacctgaaggataaggtaaggccactaaacgagggattccgattttccccactgcaataactagtacataattagatagaggggtaatatctgtctataaatagtagctagataatctaatggttagatcttagaaaatacaatcgtcgcggattcgaatccaggtccgattaaatataatataattaaaaaagtagtagtatagtaaaatataggtaaatcaaagcacctaagtacctttagtagtaaacttagatataaaaggtaccttgaaataataagatatagataatacgagaaaagaaaaacccaatgtttttatatctactccgtataataccctcctaatacgtattggtagccaatacgctttgtctagaacagtaggacatgcagaattttgggaataccttttgggccgcaatactgtgttatgaccgtcatactacagggattctgatcaagagacccctccttccaaggaggggcatattaccaatcccctctcccaaataggtatcgaaactatactactatcatggaagttcatgtagcatatggattgtcaccgctagaaattctgaagtcattttccgccttgagcagcggataatttgcgtacttctgcactgccagatccaccttctcatattcttttgtatcccacccaacttgccatacatttcttcatctcaagcaaacttgctgctatccataactaacctatcacttattgttttcacccataccgtgcacatatttggcatccgaacgtgttctaacacgccatggacctcgatcatgctctgtctaccttcatcttccatcacatattcttccccatcagactcccacaagaagctgaacatgacctagttcagctggagagccgcctgatcgtggctgtgagagatgtgctgcaagatttcattcagaatgtcagccccgagtcccagcagcgatgggacctagctttgagtatgttgtttacctggatgaagttgcataccgagcagggaattttgcagagtggcttagaagaagctctttcgaaccttaaatttaccagtaagtgggttgtgttctcgttagatctttctcccctagcacattccagacggccccggtcgagaaaacgctgacctaactaggggctattgcatgtcacatcagagcccagaactgcggatgggtcgccttttacgatgcagaaaaagacagggttctcgtcgacgcatttgaggtgtcatcggaggatggatcaatactgtcctcctctggtgggctcatacgtcgattccccggagttggtgtagctatctcggcagacaagctgtctgatccgacattctgctcctatttggccaccgaaatatctcaattagcatccgaggaagtgcctgagatgctgccgaaaagcaaaaaagcgggaattgaagtggacgaaatccggaacacaacccatcctggcctggtgacagaaggcttgatgacacaacttctggcacttggtacacaccatgaagaaaaaagggttttaaaatgtgtgcgagacgaggtaaactggaagtctgctttattaccatggaggcggtctccagcttggctcgtcatccgagtcgctctgcagttggttcttcggcgatgcttcaatgaaacggaagggcgccttcattacaaaaacttcattctgtacttcatggcaacactggcggcaagacaaaatccgtccgtagcctcccatgaacttgtggattgctatgaaatcatgcgtgctcggattggccggcggatctgcaagctggaggataaagatgaagtcttttcatttgttgccaaccgtgcacactccgcaagcaaggatctgcttgacagattgatgtctattaaaaagcagatcaaaataaccaaccgcgtgaggattccgctgattccatcatcatcatcttcgcaagatgatgttcaccaatcactgcttcattgcaaggaatatcttcaagcggcgatgcgttcgtcgcctaatcaagtaaagcccacaaagttctgtcgaactcacacatccaacttgaaatggagcaatgacttgcccattccgaagatcgggtcgatcatggctctcagtgaatttgagcaatgggttgatgggcacctacagtcctggttcatcaatcaacctgcttcgaaacatgaagcagcgtgtcgtgaacttgaaaataccattgcgcagtacttttccctcgcaaagccgacgtacatctccaacccacaagccacgtcagtgatgattcttgtaatgttggaactgtgggtagtgctagacaaaatggctctacgactctgtcccctgatgaagaggttctctcctggaatccccgataacttcctcgaacctctactacttcccaagatcggtcaaatgaaacgggcgagggaggtcgagcagtacataaatgtgcggcataaggaatcggacaaaaccaaccctagcatcttctgtgacccagcaccaaattgctttggtgttcaatttttcaacagctccgaggaacaccaaatgctcgaatgcagaattgagcagtctgccaatgcaattagagcagcaaagcaagcggaatgggagagattaagtgctcaatacgaacgcctacacgaacaagagcaacaaatgtcgcattattatgattacaatggcgatgatgaatacgttcaccttccgcgggattgcccaaggtgttcactgaacaaacaaatcgaatctatctccattcgggttcatgaatggccacttccaacagaagatattgcacgaaaaaccgctgtattcgagctcagtattcccatttggtttgcatcatggcgcaacagtacctggagagttctccacgagcttggacgaacacttacagtgactactaccgatatggaagtcagatggcttgaatatacagagatccaaacattcgtcacgagacgcgagtcgaacattgttctggcctcatatacaaaatcatggcggaagtctcactacagatcgcacagattccctgtttccttcgattctgtttgcatcccaaatgcgcttcgcctgcgacttttcgacaacacaagaattgcctgggtgacaattcagaccaataaaccgagcgtcaagagcatgtgcaccatacaactcccactcggagtgtactcaaatctgcaatacaccctcaattccacttcacactcccagaaccaggtcatagcgacccagaaagactgcgataaaaagctcagcttgctagaatttgaggcttacggatgtcttcgctctggggaaaatcttcaatggggcaatattttgaggaatctggcatcatcggcattatcactgaatgaggaggctgttgtctcccttttcaaacaagccgcttgggaactggggccactatccggaagattaggctcaatcagaagagctgcacatgaagcctttgaggatataggctttggtgactgtctgctgcacctgttgcgagagagattggtgacgattgaaaataactggaacgaatattgcaccttcgatcttattgtcacacttggtgttcgtattcttgctttaaaaagtggatcaccgtcggttgagaaggtcgttgaattcctacgacaatgtcgggaggtggcgatggattggtgcgatcagttgaatcaaagtcttctgaataaagaagagaacgacgatcaaagacaacaacagctgctacttctgattgcatctacttgccaagccacgtatgatgttgatcctatgtttttggacatggttatcgaaacgccccgagacctcttttgtttcgtccgatgctccattttactgttcgagaactcacctccagaaacagacggtctgtcgcccaagataaagcttagcgtggagaattcagaaaggatccggtcactatcaagatcacggataatatggatgattatgaactgcgcgtctggattgaatgaagcaattcaaagtggcatgaactgtcttgaagtttccgggctttggaaaacttgctcggatacctgggtaactacggaaacaagcaacagtgcgcaaggctttgggcagcgactccacttcaattatctcacaggtgaacttcttgtggatggaaatcctccagggaggttgccagctcgctttgcgaataatactctctaccaacgcctcttcggaacggtaattctacctaaaaccttcatcatatctagaagatgtattgacttttctatagagagttatcccggtgatgccatcgagtttgcccggagcatcgtttgtcttgtcacacaccgttgagaattttgaagtaagacttatacaacccaaaaagccgagctacgatacacaatctgacaattgataggttcacttcgggatgcagagtgggaagcttttgatcaaaacccgcaaggggtctcaggtcttgcagcttataccacacgaggtcctcgagaaggacttccctagagtattaatctccgagaactttcattggctggatttggagactggggctgttgaattccgtccactgaaccagccatggaaaccttctgaccgcaattggcatttgttctttgattctaattcgccgggcaacatgctcatgcaacaagattccaagaccctagtcgatgtgcagagcccgcctttccaaaaaattaatcacatattgaaagtccttgatgcaagtgatgagattgtcgtcattcggacggctgttggaacactggaggcagaactaagccgtttacggttgaaattcttcgtcaatgataatggacgtgtaacgtcaaaggagttcggcgccctgattgatgtggaccaagacatcggctgtttctatggactgaagaacaaactggtcctcgttgattcctccaataatcgatcggtcattattccttacggaaacccgatgattagtagagaagatcatcatgttgcagtcacaatcgatctaccaaccggaaatcgcgcgaagtacatgcattatttcttggacagtcatctacaagttctgcgaggatttcaccctctggctatcttgtaccaggcgtacttgcacgcaatcacgtctttccctgtccctgataacttgactcatcgctcaggtaccgaagaggctatccgtattctacgtcaggagtgtttaaaatcagcattccctcttcaaaatgatgctaccgagaccctggaaaggattgcagcacttacgccgtgccgcagattttatcctcagcaccttcgtgtcatgcaaactatcgtatggtctagtaacttaggtcaacttgcccaacacgatgacttccagtccttgtcgcaagagattcttcagttctctgagcagttttcacatttccatggtgccaaaaagaaggaaaactgcctcttatacccggggagtattgatttgttaaagcgtaaccgttgccgcgccgagcagatcatgaggtcgcaattcagcgaatcccccactccatcaaggaagataaattacaactcccgcgattgtaacatcacaagtgctcgcagtcagaatgtgtatagaatcgcagctctgattcgagattggcctacgacagttggtcattcatcacatctactggcaaccatgaggcaattcaaaaacctagcaacgctctcagctgattttacccgttactcttgctctcaaatgctaaatcagtcgatggagagtgcctgggtgggtttataccacgcctgccagacaagttctagggctacgcacacctacttcttgatttccttgttttctatccttgcgtttggtgggaagattgaccagtcggtcctccgtcaattacttcaggttgctttctcggagaaatgcaaatatattccagtgccactcaactcgacgacggtactgaatctcagccttgggggggactttgttctttctcaaattcaatacgcaatcaatacttcctacacaaccttcactaaggtatacaattcacacctctcacgtgcagaacaagccaaaatcaaccaagaagccaaagccaactggtgcaaacaaagggccgaggatgtacggttgtgtggggactatatacgagctcagtggccgtccaaaactcctgtacttccatctcatgctctggttccactggttcgtagaaagccggcacatgaaatgatacacatgctttgtcgcgattgggtccaaaaccggaatttccttgacttcctgcgccgggtacagaaggaagtgccgccctccgacccttggtatcacgatatggatcctgttcccacctcccctgtccactttcaggagattgaatacagttcatttcagccaccctgtggctttgatctaatgcataggtctcatccagacccccctcagactccgtttgctccgatgacctatcgcggggtttcttcgatcctgcaatcaacacctgagctctggtccctagcaaagcatttccaagcgagctctaaccaatgtcaacaagagtatggaaacgggctaagtcaaagtgtccaagcgttagaggacttctcaacttcagaatctacgcctggtgaatctgaccttgctgcctcttttgactgggtgacaaacggagatgcggtacttcgacatcaagaagagcttgaaagacagagagatacattgtgggatgaaattgtcgcgaatttaaggacgagtgcaaatacaatttggccagatactgacaccgtcagcccttctgtcaccgtgtggtcagttctgtctattctggcctctgataagtggaccagcattcccatccagtggaaggtgttacttgtggcatttggaaagtccatctctgccctgcgtcgttgcgagagactgattgcctgtaccgaaaatcgggatatcgatggatttctcaaagaggcagaaaacccgggctatgaggggtgggaccctttgaactacccgacttggctgctgttggaaattgaaaataacattactatccggaagcgccaagttgaagttgcagctcggatgattaaaccggactgtggtgaaaacgcagtgcttcagcttaacatgggcgaaggcaagacttccgtcattacacccatggcggctgcagtgttggccaacggccatgatcttctcagaataattgtcttgaaacctctcttaaggcagagtgacgcgctcctttctcagcggctcgggggtctgatcaatcgacgcatctaccacattccattttcgcgacaaacggaactttcttctcccattgttagccagctccagtccttatatgagcagtgttgccgccagaggggtattctgattgccctccccgagcagatgctctcattcagactcataggattagatgctgtggagagaaaccccaatatcttctcgccactgatacgtcttgagaattggctgcaaagcaagtgccgggatgtcattgacgaaagtgacgaagtcctggatgtcaagttccaattggtttatactatgggaacgcagcaatctctcgatgggctcagttgtcgctgggagacgactcagaatttgcttcgcctggtctccatacaggcaaagcgtctttgtcaggatgatccaacatgcatcgaggttgatcagctaggttaccggtttcctattttgcgatttctgaaagtcgatgcgatcgaacgactgatcggttacacactcaagtcgatctccgaaaatggaatccccgggttaccatttacccaatggaattcacgggtcaagagcagcgtgatgcgattcattgaacattctgaacttgccaaggacgacgaatctttcatccgggaagaatttgacgggagtgtctttatgaccaatcttctcgttttacgcggactctttgcttatcgcatcctgcggttctcgcttgctgataaacgttggctagtggaatatggcctccacccttcccggtgtttaatggcggtgccataccgtgcgaagggtatcccatccgagaattcagaatttggacaccctgatgtggcagtgactctcacctgtctgagttactactacgatggactgaggaaagagcaactgagggactgcttcgtgctcttggccaaagaaaatgacccttcaactgagttccataactgggtcacgcagtgtgtggatgatttaccagccggtttacggacatactcaggcgtgaacctcgaggacgataagaccttcacccagactctgttccccattctccgctatcagaaagagatagttgacttctacctatctcggttcgttttctctagagaagcaaaggaattccctcggaagctctcgtcatccgcgtgggatattcctgcacggcgtggccttcaactgacgacaggcttcagcggtacgaacgataaccggtttctgctacctttgtcaatccgtcaaagggatcttggagaacttcttcacaccaatgcaatggtactaggcttattgctgcgagaggacaacaggcaatgtatcctggcgcaggatgaggagggccgccagctagatgttgatcggctcctgaggcttgtagtcagcaccggtgaaggctcacccacggccaagcctgtacgagttttgattgatgttggtgcccaaattttggaggccgggaatcagtcagtcgcccaaaaatggcttgccatgaccccggagggagatgttgaggcggcaatattcttcgaccaaagtgatgagactatggtgattgaccgggaggggcatgttgagactctcttctcgtcttcgttccgacaacgaatgggggcttgcttggtattccttgatcaacaccactcgcgcggtgtcgatttgaagttaccacttgcgacgcgtgccgcagtcactctagggccgagactaacgaaagataggcttgttcagggtaagctgtgaagtccagatatctttcaaagccagtactaacttcctctcagcctgcaaccgacttcgtggccttgaaaaatgccaatcccttctatttctggttcctccagaggtcagccacaatatgaggtctatattggggatatcatccgatagagttttcacttcagcagacgtactaaagtggtctatggctcagacatgccaggccctggacaatgtacgcccgctttgggcaaaccagggacttcagtaccacaagaagatcattctttgggatttaatagtgggacaaagtgacccctccacgaagtctaaaaccgctagttctatacaggagcctgaagcccggacactctcccagctctacgcaccttgggacgaggataggcggggtaggaacggccacaagatgcctgaatggaatgtcaacaatgagcaagttcaggagttgttgaaaactttgcagtcaacttcaggtcatatcgcgacttctgcttaccttcatgaggaacaagagagagaaattgcatgcgaggtggagcgagaagaacagatttcacggcccccatcatacgagcctgaagaccacaacctccacgacgatatccggtatttcgctaatttcggcaagttccgtgataagaaaccatccaaggctgttacattggctttccaaggtctggaaaatacatctgctgggaaggagaaccatccacatctgcttgggcctagattgtattccactgtggacttcaaccaaaccgtgaaaatttccaagaataatgtcatggatgatttcagcaagcaggtgaattggattttatccagtgtccacagcgatgttctgattatcgtgagtcagtacgaagctaatgagctcatcaatatcgttcgcaaatcagagaatgtcagacttaacatctacaccccgcggctaacgaagcccatgcggtcgttccgccaccttgacttctttggcgttggcgcaaacattccaatgcagcctgacgacgcaatgacacggtgtctggagatgttctctgggagcctttacttcggctcattcgaagattacaacaatttccgttccttcttggggcttcttacggataaccttggtggaattccagacgatgccatgaccaatgagggattcgtcaaatacatttcccgcaggcaacttcaatggcctatcgactcaccctttgttgaaaatccgcttccgttcctcggtgccctgattcatattcgaaccaaaggaatgggataccaacaatctcatgtcggcacactcgtcaaagccatgccattgagtgctgaacgattttgattccaagcggaatgttcacttttcttggcgtccaatgtttggaaaagtttctcagtttgaaccaatttgtttttttttttttttttttggcaattcttttgatgtttatatgttgttttgtggtgctggtgactttcaggccttctagtttcgagcttgctgcaacggtcctgccttaggtagatttgaatgttattttatctccttctacttcactctcttatgaatcttccctagcgggagactcggacgttaaatgcatattgtaatgggggattccagtgcaggttgactgcaaaggggcagagcggccaaaggtcaaagtcaaatgcctgaatgtgcctagattctgcctaatttcagactggcagaaatgaaatacgtgaattaccatgacagagggcttgatcataaagagaagggattgctaatttgacacccccccccaaaaacctattctgccctgcaacttcctaatcgggtaccgcttttccctcgacgcttactttcatctccgcgttcgatagttgccgccttctgattttatataccgctttcgtgacaatagtagtaagacagcagatacctaaaatttgtatggaagtctaacaaaatcaagttatatttgtcatagtaactgcttcatcaactactcccatctaccaaggagttgattcctatagaaactaggtagaaagaatatacgattttttccgatgaaactgcatgtttctttactttaccgagtaagccagaagctggcagaatatatagtcgtaccgaatatggaagtcggtactgaaaattcaggtagagtagaataggttgagagggtcaaattagcagtcccctaaagagaaggaaaaaagaaaagaattagaaaaaaaacttcgataaggaaaatcaaaccccgatatttgttattcgaaagtgagaatatggtctcataggctaaaagagatatatgatggaaaccgtacagcgcattttaccactctttacaactagaccataagtaccaaggttcctgtttaaggccctatccaatatcaatgatgcaattattatcgacacatttataatagtatctcactcgcaaaagttttgcacattcctacacattacatccttttacatgctgtatcggccctagcaagttgaagcgaggaaaaccacttcctcttaatcatgaggaaagaacgtttgtattcttattgggaccgtgagcctccatgtgcgtcttgtggcactggctctgatgaggtacaagacggtaagctctacccagttgcaacttgacaattatatcgcaatagatcactgaagatcagctcaatgccagttcgagaatgtatcgaagaatgttatggtgataaagaaatacctgaatggttcaaggattggaaggatgacctttccaaatcatgcgtgttccatataggctgctggagattgttgatacaacatttcaacaacggggttgttcctctcgataaattggctaaagtagtcaaagaagcaccttggccacagtatcgagcctgtaagtcattgtttacttttcttataggtttttgcatccacgagcaatttcaaataatcaatgagaacttttagatcatgtaatcccagacaccgggacgcctagctcgagatgctttcgatatatcgggttccgggccgaatcaaagacctttccaaaggcagaaaacatggaatgtgaacatcctctgaaggatgagtcccaagtgaatgactgctttcgtctccttccactcgaaatccgcttcgaaatcgcctatcttcttccaacgcccgaatacctcagcttaagacttgcgtcgaaagctatggttcacatatttgaaaaccaggaattctggaaaacacgcttcttcattcatcgggaacgaggatatctcaactatctcttggaagaaggttgtggagactggagattaatgtaccgctgcactagcagactcaagcgtctagcccggacactacggtttcgaaggctacagtggcttcataacgagtggatcaaagataggtgtatgatgattggagctccaatatctacgtcgcctgagaatacagctcaatttgatggcctagtgtgggaaagagccgcaggaaaagtccaatgcgataggccttacaaatccgaaatcactcctccatcttcactcggcaatgacatctgccagcgatgtcgtggggtgcataacctattaccacctcagatggtcaccatctctagtgagctcgtggaaatcgctgtctccgtacttgctgaagatgaacattcatttattaccgggctaaaccttgtctacggcgaaagttcaccaagcattagccttggctatcaaatccctcaaaagcagatcaagattgatctccgtggtcagccgttgaaaggcttcgaagtcctcgctggcgaagggggcatccaggccatacgtccaatatttgaccaaaaacatggaataagccgtagcatgattggaaagccgaatgcaacttgcaaatcagtactacttaacccagatggagagataaaagcctttgcggggtatttcgatgtaagtcaaatatgtgctgttccaattcacatgcgcagcttactgactcaattgtagcactgtaggatggtacaattttcaataggttcattgcgtccagaatcattttgctgagcagagagacgcaaactaagatgtctagttagttaactaacttgctgagatttacgaaatctcagattctcggatctggcttctgattggtcgagaattttgtatcgacgtgactagggctagtcacgttactaccggccctctataatatctattcatgacttgctagtacctaggtagggtcctattaaatgtcatggccttctgccaattgctaccaatacgaagcgtctatttgagcctatcattcgatcgacctttctctagaggcctatggtatcgagaggaaggctttagagagcttccgggctcgttgcctcttagtaacttagatgtcatgatctaccatagatcgctatcatatgttttatttttgcttgctcgcttattatttgcattgtttatcagtttgcattagatggattgtttgctagacggctaagcgagatgtttgaggtttgcgacgtttgcaaagggacagctatatcaactggctgcctcccactccacatggcaacttgcctcttctttctctccaccctagttattttgaattaaaagcactcttcctctctgagacctggcacattacattataactaagatccccagctacgcggtcctatagtttgattattagcatttccgctttcgtacactgcatagaggtctcatattgcgagtatatactcggcaaaagcgtcttttctcttttaggtagtccggtgacgcgacagacttcaggttgcgagctagagactagactgccccgggacgttcagtagccgtgcgcaagagactgttcggaccctcgatacagaacccggattttttcttttccttttcgaaacccgaatccacctttttttcttcttttcaaaacttccaggtaatggtttcatggaatcatcgtgcgacaaatcatgctggcaagactgagaagttgacgttgaatctcggaaggtggtcttgcacgaatagcggcatccaagtgtcgtaattagttgaccggtaaactgactctagatctgggagaggatcttaatgttttggcggtatgtaaacgaagagataagttggtgttgagcctggacctgttgaatgttgaaagtttgaatttcgactagagctgctgaatctcgctataaaggttgacaaaagttatagtgcattcagcgcgaagctctggacgatattggtgatccattttgacgaagatccagaagaggtaggctattttttcaacatagatattaaagaggggaccctgtgacggggtcaccagggataccgacagccctgcctgtgaaacaggtgtaagagcaaattcaccactgggagtggtagggtgcttgagaggacaacaccatggggtgactactcagaagagaaggtggagggtgtttgcgttcacttctcagtctcgctagcatgatctgtcgcacaattatcccaacttacacataacacaacaatacaatttttgatcaacttggcgtgtgcacgacaactacaacaagattcagggagaccgtctccctttccaattcgcaggacacattccaattgttcattagcttacaaccatatctctatctctcgttctatatcattccccttcaccgaacacatgcatttttttcttgtcctgcttccacgtatctccatatactaaccccgagatctataacgcttgatcaagccaatgaacgccaaaaaaaacccggtatcaattcctctacatcctcctactccttcaaccctactcacgaataatatttgcatcgcctcttggccttctttcttttgagcttctcaacccgcctcgcataggcacggctttcacggttggaaagaaattcatatctttcctacaaccgaacgaagccgtctactttactcctagtttagccccgaaccattacggtgtttttctgctattagccttacgccagtttctccctatcaacataatatattgaaacccttcaatgtgccagtctggagcttgaaagttgcctgctactacacatttatcacatgcgacactgcccccagtgtttggcttgagaataccccgactgccattgccaatcatcctccggtttcgactcattctagtactcctagcagtactgctaaagtgagctccactgtagtcgctactcctacactctcgttcacttactgtctctgtccctgcagctctgtcctctatcgttactggcaatttgcccacagttgcaccgaccagtcgattgtcctccgttatacctgtggattcctcaccacctgttgtcgcaaacgcgcgtgcattctttatcattctgcatcagcgtaactccattcaaccgcgagatctgcagcgctttatcaagccaatgaccaccaaacaacaacttgatagacattactctattctctcaatatctcaactctacaacagctctcagcgagatggctgtaagtccatgagtgcttcaatgtatcagttcatgaccctaatatataagtacagtaccagacacagccaataatagcttcctacatagcgaagattttacctgggacccgagaggttgaagttgaccacctctggacaaacctcctcgcatattatttcccaaccacgcaaacctacggcgttgaacgggaagcctatatccgatctaggtcgcagaccagggcgaacgtttgcgtgagcacgctaagtgatggtaaaatgttcaatgtgattatagtggagaagaaaaaagcctcgacgtcacgaagtgctcatccaacgcccggttcttggactcatgcagagggacaactactaggctacatgctatcccgccgtgacaatcaagagaaagatcttcggcgtctatttggaatagtaggcattggaaggtacgttaggttctatcaactcatacgaggaaagaccgagctcgaagattataaagatggtgcgacctaccacttggataatgatggcttagcgattgagcgaacgattttagcgataaaaagctacatcgatagatatcgttgatatagttcacggttttgttgattgtttctttcgtgcttttttgtttccattcgtttacttttttaccttttatctgctgtcttcggtctgtttttttttatctttatggagcttattattaccattttgtttcgggtgctctttatagagtatcgtagtatatacccgttgaataacacacacgaattcgactagttcaactactcgattggccacacggcaactataggcagttctgtctgtgggggctataaaaccctatattaagcgctaatcatccggaccttagtagatcctactggaccagcggtactagaaatacatttggcgtttatttactgattataagtagctgtactccgcaaaaggcgcgggcttacaaaggcgcgaaaccttcggtcctgcctttgcaggtcgactaagcggtcacgtgatataaaacacccctgaggcacagatacttttcacttctttattatgagaaagaccttggtcaacttttcatttctgatgtctttgcatatctgtagggagacgtgacctcctggtctgctcccaacaacactttcatcctcatacaaatgaggtttcccagagcactccaatagtcaagtcgtcttctcaagatatatccaacaggttatgacctatgctattgaatcctctacatacttgcaagcttcaaatcctctatttcctccaattggtgccctgcgtcgcatactccacagtggggctctgatcccacaagtcagaatttccacgatctctattggccgaaatcggcacgtggacgtacctctcactttcaattggttaactgttgtctccactggccgttcgttgatttgattcgttggccactctatttttcaacccaaaattgtatgttttgtttgcactgcggtcacgttagctttctcgccctaatgccgattcattgaagcggcatatgaagaaatagaacaacataatatatccacacttacatggttgcgtaatatcgcgtgatgaactactcaactaaagctcttgaggggacactctcagcttaaaatagactataatacaaagtccaatacaacatcaaccgatttctcgcacgcagcatataggcacgagaagctgggcgaaacagatggctggattacttatgtagtatcgaaaatatctgagcttagtgagaatctttcctttgtctatttgactgtctagatttaccaacttgattcaggtaactgttgtttttggtgtcaaaatctttgttctttgtttaaagctcgcctatataaaagacgttttccacaagcaggagaatctgacttacattaccgtcagttaccgctcactccattactaaacaaagtcctagtgtcgttgtgctatataatatatgatcattcgtgtcgttggattggatatctcaaatatgatattaaaggtgcatcagttcccttaggccctagtgtgagcttttgccagctctcgacatgctttgcttgccattttttcccttcttcctttcaatttccatctacattagccaataaccgcacttccccttcttccttcacaactgccctcgccttatatatgatactagtgtatatgccttgatcatgtgagtctacaggcccctcacttactgacaacgtcaactcgctaactcactaagctagcctagcttacggcctcgctcccacaatgacgtctcgcttcagtcaatctccccagtgtttcgaagaagccaacccccacgtcgcgtgcacaaacaataatcgagaccatatactgctagcactcctccaacgagaacttgatccgtaagcttctgtgccattctcgggtcaactgcaatccggtgtgataataactgattgtcagttgatttttcccagtagtgtgctaacaagatatagaaatgcccgaattcccacttcggtcgttcggtgattccgagctagacatcctcatgaatctccgttatcgaaaagcgcgatctatctaaatgatatttcgagtgttcggagatctaccaccatgggaacttgacttttcacatttttccttttctgcaaacagtctgcgcaagtcaccgtcatgtggatagtaactggaatccgactcaagcgaagttgacattcgatgtcaagattgttagcagggacaagaaaatcggagagcttggatcgggcgtcttcagcttgtcatgccaggtagacggcttcctagagtcgaaatcaacctttcgagcacaatcaatcctcgaagcaaaagctctaaggcaattaatccatgaaccgaatgtctattggcaggagaccaaatggttagccctgttaaatgcgcatcctgagaagagccttccgaaggataggtaagcatacagactgatatcgctatatttgagtttctatactgatatgactattagtacgccgataacggtattcatctcacaccgttgccgaatgtttctggcctttacctcttataaggacgggtatagacaatataatagggtgattcgggaaagcgcttcgtgaagcaagacgaatttatcgaaattcaccgatataatccatattgtgacgatccgaagatctaagaacatgggtgtcgggaacagaaggtactcgtcaaccgcacttgcctggtctgcgttgcaccttcctcaaacgtaagtgaggaacaccctttgcatagcttgcagagaaggacacgcacaaaacccaaaggaagagcacgtagatagttttccttctcttttctctttccgtacttagtatttggacagaaatgcactcttttcctctgaactgatctggcaggtaacacgtatctcatcattaagaaggaagacgcaccgtactttgccaagctagccctagccgtcgctctccgtacgagtaaagaaggggacgaaagaatctaaggctcaaagggcatcaattgtgatacattcagttctcggctataccgaagcgcccctctttcgtaaaaattgcccttaactcggtgctataggtctacctgaggtctacagaacggcttcatgatttcgacgctcgccgaagagatgaacgtctatatacggattgagtcaagtcgatacccccgagcgataccccgaccgaagcaaacaggcagacatgtcgtggggccagtccgtgtgttgagggattttccaacggtctgaaagcagcatgggtcagcgaacgcaccctgtcggcctacttccagatgaagtcaaaatcccctagtaagatcccagacacagatcgggactttttttgacatatgagtaaagcgaatgagacttgagcaatcggtgcgatgggtggaatcacagtgggaataatggaaattaaacttcagtcagttagtcgatcaagacaattaaagtagtaacattgttatccaacaatgaattgtgcccatcaacctcgggccaatgacccgaatcgccactagccgtagcttatctcctagcgtcgggccgaactaccaaaaagcggatagccaagaatcgaatgacgcgcggctttctcgtatgttataggcctgtcgtatatgaacgttgctttttccgctcatgcagcccgatctgcgatctgataaaagtttccgaaagagtcaatttcttcgcactgctcctaccagagtaggctctcatcaagaatgcgaccacaatcgctcctcccgatactcggggttctagccttatcaaatgccctctcagcagccccaaagaacgtgtcgatcagcaatgagaatcacattttcaacgtcatccaggactcaatgcgtcaatggggatcgtctctgcaccacaatggcgtgtcattcttcctcgcggccgttcccgccggtacgcagttctaccatggaacctccaaggccagtccagtgaatggcaccgagtggttggcgttcgagcccgaacatgccatggtcttcgcccggccccgacgtggccccccgccacacctaccacccagtgatgatgatcccgagccagaggatggcagccatggtgagctgcggaagcgtgaacaccatggcccgccagctggtcgcccgccgaagatattcgatgagaatgagtccgggtatctgcatacgtatgctgcagccaaggatctccgccttctgtatcttgacggtatgtctgccgccaagacatcgaagggcacgctcgattctcaggatacggttctgttcaacagttcgttcgaagaacccccgaggggtggcgggcaagagtacgaacgcgccagactggcctgcgagatggccgagaatgaatgggaaggtcgcattgacggtgtgctgcgcatggaagctggctttgagattatcctctgcaactttgagcgcgatctaactacagtgcgaatcacgcaggtcaaggaagacactgaggaacaccgtggacttaggggtaaccgtgaacacggtgaccgggatggtcctcgcagagagggtgatgacaagcaccacgacggtcatggcggaaggaaggacgatgatggaaggcgacacggccccggtggccccggcggtccgaggggtcctggtggtcctggtggtcctggaggtcctggaggtcctccccacggcggacctggaaacgggcccgactcgtcgcgctggatgcgcgcaatcaccgcacgctacaacggaatcggtgggaatcgagtgtcgctgaacttcaaccacttcgtgacagccttctcctacgacgtagaactcttccaagacaattcaaccctgccccgacttgcctacctctctcccgaggagcgcgctgctatccgtgccgaagtcacaaatctggtcttgacgcatcgtcctgccgatgtctccgaagattggcaggcgattacggatatgatcgtgactcggtacggcgatgagctgtcttactttgcttccggctggattcactcaattgagcgcctgcagtccgagattgagcgtcttctgtcgccgttcattgactacagtgcgcgggatgatgtcgctgagattgagcgttgtgcaactcagttcttgccgccgttgtctttgaagagtggtagtatcgcggcgcatgctgtccatggtgttgctcaaagaatctgctcgtctctgattgaggctgggaaggagaaggagcttgactctgcggttcaggttcttcgggatctgatcggttatcttgattgggcgacgtggaaggagtgccggggttgtgcggcgaatgagatttgtgtggtgcctatttggcccatgggtacaatcgaggactatgatagtccaaagtgcaaggatgcatcaaatccatacgaccatcgtggagagagctactggggtggaatgcaccactgagtgacttaatgtggatcactagcctttgttttagttcgggttttcgaccctcttccagccagacttgagatttgctgtttggacataattggtttatttcaggcatatataacatttgttgagggtatatacagaatacagaacataataatgctcaagaagtatgtagagtatgtagaagggattgaccattttgttcgtcattgttgtatgtggcagttccaaagcaaatcacggagtgatattccctttacatataagaagtaaaattggcaaatggtagaaaagaaaatcagatcccatcaacgggagaatatttactggacgagaccacccttggcggaggagacgatggagccgacggtagtgccaacgctgccaaggccgagagtggagagaagtccctgaacagcgccgtcaaccttgatcaaaaggacggaaaccttatcctcggcgttgacagcaatgaagttagcaccagggatctcgggaaccttggacttaagctcagagacagagggagctacggcgacgacgttgccgatgggaccctcaatggtggacaagtcaagaccgctgaggagaccgacgacagtaggctcaacctggacaagaaggttcttgccaccagcaaggccgttcacgtcagtgatggagagaacgttttgtagagggtcgtcgcgcttgacgtttccagtgatagactcaaggccgccaacgatggagccgagaaggctgccgaccttgtggaggccgagactggagagcaggtcgacgacttcctgggtcagctcgatgagtgcagcgttgccattgtcgaggagggcggtaatctgggtgaggccggaaccggtgttcgtgtcgagcttgtcgacggactcagccgtttgaatgacctggcccactggcttctcgagagcgctcaagggcagcttgctcatcaagctctcgagctcggactcggccatcatttcgattttcgaggttccagcctggttgaggatggaaagaacctggccagcaccggtgggatcaggcaaggtggagaatgagggagttgcggcgacatcggagccagagggaatcatagatgtcatcggtagaggcatgcccgaagggatgacaccggagggcaggctagagggaactccggagggcaaagagccgatggtacccgaagggatgttggcgggtagggccatagccgcagaggccagaagggcgaaggcgaaagacttcatcttgtcgttcaatgagtggaataagttcaaagacttgtttggtacaaaggaatggacggtgtggaccgagattaaagaatgacttgttggtaaagaatgacaagaagaaagttcttagaattcaaacgtcccgacaagacgacccctgttatatacgatagctgtcagcatgggatcagcgttgatgcgagtccgacccctcgtctgttgacgtccttgagcgttctcctgagctaacaagtcttgaaaggggaccgctcatgtcggaaatgagaccgatgggagaatggagcagtattgttcctgtttcatcggccaagacgaaagtaagcttcacgctgagtggctaataaaggcgctaccacacaagattgggtccgacacatgttgctagctccactataagcttcgtatgaggtccatcctcattagccactttgcagatcgttcactcggtgcaggaacaaagcccgggagggttcccactctggctgtcaggatgaggccaagatattgatggaattttcgtctttatgggccaaatgcagatcatttgtgaatcgggaaaccccttggtcaaggtataaaaggaagcatccgcattctagggtaaatttgccgcatagtgagcttagccttcaaaatactccgcactctgtatcatcacagcaatgaagattccgagcccaaatccaccggcgcttgtgattgatcgagtcttgtgcagcgaaccctgaaaagtcaagccgggatcgacatgactagtacaaccgtgcagatcggaatcaccaatcatttgttggtatcctgcgcagggtaacttgagatcagcactctgtccgccagaaaagattgtaagaagaaggttaaacccaacgtaggcaacactaaggtagattgcaatctcattcctccatagtgggtcgaaatgtcaaatagcgcagtggggccgtgattcccgtcagctgcgttgagttctttgtttgcaccctgaaaaacggcaggattgctggtgatgatatcatcgtcgtgtcgggtagtggcaggggatcgacaggggttaccaaagtcgcgggctaacatggatgaaggtagatgttcacacgtactgcgaaggggcagagcggccaaaggtcttggaaccaggttggaacagcttattattagtaagagatggtttagagaaaaagtcccattgtcgtagtggcacgattcgttggtacacggggggagattacaaaatccggggaagcgggtctgtgggttcgcgagagaatcaatacaacttcatttgcttccttaaaaaagagaaaaaaaatggtggccttccccaattttgtgtcacaagtgataggcagatctactcgtctaaaccaaccgcttaacgggatatatacacatgcgttgttagcgaatctcgactcggtcctaccccaaacgaagggaccaggcgggccaacacctgttaggattcctttgttctttgagaactcgccctggctcgaacgcacgctctctcaagttctggcggtcaacggaaggtacagccttgggcctagagactgcaccaacggtcatattccactgagctaagtggggcttggggtgaaataactgcccgttctgttcatcataacagagccttttttaatcttcctagtgatttgattggctggatcttgttgttctcagttaggtaatcttgaagctattcaggtatctgaccttcacccgctctgccccctcacccctcgcatacgtactcctgagtccttactccgtagtgtcacagtatcaaccttccaaagttgtaaatctgaatattccataatgtgaaatgacatggatgtgatgacatggatgtatccagggaagatagtcaggggagaccgtcaaattaaactttgagagggtccgggatctcaggggtaaactcacacgtttggatcagcacccggacatttgttactttgatctgcttctcgaagccagggtcttacagaggaatgtatgtatgttgtggatgaatttggaaataattttatacaactctaccctgatatacatgtgccttgacgaccgtgcggattcccactcggcaatgaattactacttagcaggacaaaatcctagcggctgcggcttcagcaaccaccatgacagcagcttggatattaccggtcgggaggtcgggatggatactagcgtcgacaatgaactgaaaaaagggttagtatcatctttcgagcaacgtaacattctggacttacaaggttatccactccatagaccttggtattagtatcgacaacggaagtgccgcccttacggccatcatcggtacccatcttcgcagtgctggtgtagtggataccagcagtttgagaccccaagatggctgagacattggtgtaagtctcaagctcaaagccagtggatggggcggtgatgctgttgaccatcttctgaataaaagtacgggcggccttctggtcagcagcggtctggaggtagggcgacttcacaataacagtatttccgctggcatcaagtcccaggacaccggacgaggtgaggccgtgagtcatgtacgtggtgatggtgaccacgccttcactagtaggtgcgcacgagccctggtagtactgggtgtggccatcaatctcctccgaggtgaagaagatcatgcggtgcttgccctgggtcagtacaccgctgtgattgcggtagagggaaatatcgctagagtcggttccgttaaggacgccgtcgtagtcaacaaggccaaatgaggcgttggtgttgaagacgatcgagaaaatggggtggtccttcagaccgacaccaacaggcaggtcaatccactgggccttgggaggaacggtaactccgctcttcttcgcagtctcaatctgggcctggccaccaataccagagttccacaacagacgtggagtagacaaagcaccggaagccagcaccacgcgaccatgtggggcaatagtgatgatctcagagccgcccgaggcagtctgcacctcgacgccagtgacctgactaccggaacggaccaagcgaatgactttggtttggagagcaaggtggaagttatctagcttggtagcatcgggtagatatgtgcgaacagggccagcacgcatctggttcttcacgttccaggccgggtagctgtagacctggtgcttctcattcggctgggcgatcatatccaccgacttccaaccaagaccaccgaggaacttggacagcacaccataaagagcctggtcatatcgcttgccgtcggcagagggcaggatggttccagggttgcgtttgtagagtcggtctgcagccgactggacatccttccacttccagcccttgggccacttgtcgtcgaagtcgcgggctggtgggtgaacaaagaccatgtagttgactgttacaccaccgccgagcacacaggcagcagtgccagcagtgtcggtacacacatactggttccagacatcgagcgagccgatgtcagccgacagtcccgggagatcgatgggagtcaatgagtggtcccatgtcagggtctcattgtttccggtggccactgttggtccgacacctcgctcaaggagcagaactttctttcctgcctgggcgaacttctcggcgctgatgattccggaagggccaccaccgaccacaatatagtcataggtgtgattctggaagacggaagcggtggcagctgttgtaaaaacagagagagaaatggctagagagccagcttggaagatcctcattttgacgtgtacgagggaataagatctcactgaaatcccgatctataaatcttgtcgggggagttggccattttaactgttccacaacgagtccgtcacaccggtacagtcgaactcggtggatcaattgttgaagacttggcacgcgagcgaaacatggcgaaacgtggctcgtcgtgggtttaatttcgtcgaatgtcaccgattaggtatagtgcgatcagataagagaactaacttttcttgttcctgaaccagcccactgggtgaacatctggaattttctgggttcttgtctgataatcatagagaaaaaatagcacgcctttgaaactacactatacctttgttgtatgccaaattaggtatgttggccttgaagttgtagcgcttaaagtggcgccgttttaagaagtctcggaccgaacatgcatccacttcaatcattactttgattcagttctcggagtagacataccgaaagggtctgtgttccgctcattcttccgggatagggtttccccagccaagtctgccgctgacgtagagataatcaatctcgagctttagggtatatttttctgaactttgattagtgtatcctatggaagaggcgtcgagaaacagggtactcgatcgagttctctttctctctcagccaccgtcccacatataccttggcagttctattgtagatactgtatgtcacaaagttctagaacacttaccaagtggatagtggatatcatgagaattcctaacgtccttaccaagcatgcaataagcagaattgccgcgagacccacttcgattaatcatgcattatcaatttagggaagtagtaacaacctgagggttccatccaagcaagctcatactttctagtcggcatgtttttctcccgcgccgaaattctgctagacatgctgacccccacagaatggggcgaagctgtcagatatgccatgctgtactccatatatcgtagcagctctattctcgcctttccaggaacatccggttggctcggatcgtatcgcgatccagtgatggtagtatggtagtagtgccgacaataggccgaaccgtgaatttcttttgaaacacatccttcgtttcatatagtaaggggcgaagcttgcaatagtgtcccaagagaatatcggcatatggacagataatcggctactgctaataatgcaggcattaatgtaaaacttgaaaatatgagtggaaggccgcttataagctcgcgtgaccaattcctttgtcgtgaaaccaggattcgagatatatatctccgaagtttaccgtcatatgctcttggtgctatatttcgtgactaaagcattgctacccacgataaattccaacgagtacccgagtttgtgtctggctcaattcaattaacagagaactagttggagacataccctaaaggtgtagcatataacatgacgtcatatgctatgagcttgtggtttgagttgaacaagtccataatcagtctctgactatgactgtggccaaaagattcggtccaagtgctactgacagcaacaagcattaagatattgagggttttgtaaattcccacttgaatatgagacaagatggggaatatgagggtcaacaaaagagtggggctaaccgttgcggaagctcaacatctccaacatcccttgtaccaaccaaggcgagatcacgcttaagatcactctcctctaggaagaaaatggcgggatcagccggccgccttataccggcatcttcacgcactcttctcctcaccttcgacgcgttcggcaccctcttccacccacgtctccccgtccccgaacaatatgccgcgaccgcgcaccaattcggattatcgcgcactgccgtcaccccggacaaacttgaaaccgccttccgggataccttccgtgcacagtcacatcggtatccaaattatggtcgcgcggaagctctccgaggtcaatacggggggccgaggcagtggtgggaggaggtaatcagggggagtttcaagcgtgttttggctgcagagaatggagagacgcgccccggagacccagaagaacatatttctgatcgcatggtggaagccttactagatcgatttgctggttccgaggggtacgcgctctttgacgatgtgctacccttcttccgccgaatgcgcaaactaaaggctgcgcataagtggtcgtttgataggataattgtgggcgtgatatcgaactcggatgaccgagtgcccgctgtgctgaagtcgctggggctgacagttggtgatatgcgcgccgaccaggatcgatcgagtatggatcttcctgggtttgagggacgaagtatcaacaacgatgctgccgaggaacacgttaaagatcatgcagaccgcaacttggacctcgatatcgatatggtcattacgagttatgaggccggtcaatcgaaacctcatcgcttgatcttcgacgtggcgagacggcaggctctaaaggttgcccgcccatggttgaccagcagaaccaaatttagttctgtgcatgtgggggatgatttaaaaaaggatgctcaggctgccagggatgcaggctgggagagctacttgcttcttcgagatcatgttagttacaataaccttgactcgaaggaacttccagatctcctcaagtttgcagataaattggagctttttccataaaagcactggccacagcgagcagatgaacagttgaacttgatcaaagtcaatcatggatcatatcaaaccacaagtgaaggaaatacctacgaagttccttgagctctatggaacatcacttgccctaaactgatacaacgacaacatacgaaattcttgacagaccatgagtctgtgctcctcaccctcgggctttagcttgatgcttcgcttcctgaaacacaccacaccgcctttctctacattagagcttcctggcaccgacgacctggatgtttttgcttctccacaagcacccaaagcgcaatctcgaggccagcctcaaaaatcgtgctggtttcgggtttggttcattcgcatccacgacagggtctattctttcggacagcccacagcaccgaaattaattgaaaatggctgcccgaacggcttcactcgattggttgacgtcaatgtggttgtattgctctatttattactgcggaggggcataaagtaataggaagtaactatgtggtggatatctagatagaaaaattatatccaaagatattgtatattcagttagctattccatttctttgcgaggcttcatcctccattcaggacagagatcaacgactcttttatacaacgcgataccgaaaatggctagttcaggtctgtcatatacacaaccaatcaaaatctcgtacggagtacaccccgcatatccggtacggagaagacaccgaactgcgcttggatctccgtcctggttcgcgaattggtcctgcttcattacctcaatttatcaaagtcttgaaactcgacgcagaagtcccactctgctttgacattcaagatggaaggggttcaaaagccacaggggtctgttgtaatcatcggagctggtactcaaggtagacgtcttgcgcacatggtaagtgctgatgatcaataccataaacatctgcattggtattaaagtattgaagtggtcgagccgaggcggcaccgtccgtctggtagatccccaagagaaacagcttcaagatggtctgaagtacgtggaacaacttcgtgcggatgctaccaaccacgaagggaattgggggaagattgagacatcccagccctcttctttgcaatctacactaaaagtgcatggctcgttgttgaggtatgacttaactctttaccaatagcactcatttattgacatggcttgatagtgtgtgccggagaacttggaccttaagcgaaaagttatcactcaacttgatgagcttgcacctgaagatacaatcattgcttcgaactcgagtagctacggaatctttgagattatcgatggcatgagcttgaagaacaacaagagaattatgagcgcgcactgctgtaggtgactatatgctaaatggaatatttcgctaacacctagtgtcagattggccgccagagacatccggtaatgcctattccaaattatagccttttcttcaaattgctaacttgggagtcagcaattgaaatcatgggccacaaggatagcgatcctaagctgattgagctcgtcctggagcaatgtaaagaacatgggttctcgcctttctacgtcaaaaaagactctgtcggctacatatacaacaggtgagttattcttctccctctctattactacccgatcaggtttctaacaatcttccagaatctgggctgctatcaagcgagagactctgctcacattgtctgaaggtgttgccacacccaaagaaatcgatgccattttcaaagacgtcttgaagacgcccaagggcccatgtgaacagatggatgttgtcggcttggatgtggtgttggacatcgagaatcactacgccgagtctcggagcggaattcctacagagccgcgagactaccttcgggagatgattcaaggtggaagtctgggtgtcaaaaatggccggggattttacgactatgaagaacaaaagaagtgaatgtttctatagactaacattgatctattctgtcgtttgacatgaaatgccctcttataacttaatagtgaagtcccactataaccaacgaatcagctctcagatccgcctggtacctcagcatcattggtctagtggtagaattcgtcgttgccatcgacgaggcccgtgttcgattcacggatgatgcacatctttttttgctttttcttcgttatagagcaaaaagagaaaaatgtactccgtagattgctcccatttggaaaggtcgctagaaaaatatgcaatctaaatcgttgattgaatatgtagcggatctatcatgaacaaaacgcctaatgcccgaactccatgttaccctaaccccgggaaaccaatcccattccatcataacataacaaggcaaatccatgcccatgcagaaagaaagacatcaaattcatcatccactcagtcccattggcccttatccaacgcacccaaaccaccaccagtatgcttacccagcaacttggcaatgttggaccccccgctgcgctgcttgatacggagctccttttcacgctcacgctcacgggcagctgtgtacgagttgacggcaccgcccttcttaggacccgaagctgcaggtttggtgacacggttggaggtggtcgaactactagaagatgaagagcctgatgtaacacgacgtagaagttgaggagggcggaatccaatgggaccctctccgccgctgccgctgtggaatgcaagcttggagtttgtaggaccagagttggtggatgtggcggagttggacgatgcttgtcggaggagtgcaaggcggtcgaccacgactccgcgcgtgcggcgtgggtggctaggtttgatgaaggtattgtccgattgcggttgatcgtgatcaccttgggcttcttccgcgccgggagtttcatcatctccttgctcgtgttctgcctcatcaagtgaagcatcgtcctggaaggagtcgtattcgaaggtttcagtgaggaaggacaacgtttcgcggatctctgctattgtggctggtttctttgacattgcgctagcaggggtgcgacggaggcgaggcggcagacggttggttgcatcttcagcggatggctcgagagggcgcttgcgactctgaccatcgctcgtcgcatcattcgactgctctcctgaaacggggacctgcggagtttctgtttgggagccgttctcttcttcctcaaggaagtcgatattgaagtcatcatcaatttcgcgatcctcaacggccttgaagaatgcggccttcttggggttgtcggcaatctcgccgattttctcgtctgcaaggagagcgcggcgcatcttagcgaactcgcgctgcttctcacgacgacgtgctaggagctcatcatccgagtcatcaaggtcaaagtcgtcatccacatttttgcgacgacggagggctccagtggtgatgtctctcatcaatttggcgacatctttctcgtcgcggttgcggtcgtgaatcctgtaagaatgttagcatcttctcattgaaaatatatcaagtttgaacatacgcgttgagtgcggccagttgcttctcatcgaccacctcgccactgttgtcattgatcatttggcgatcaacggcattttcttcgccatcgctttcgtcactgtgacctccaaggcctgcatattcatcttcggattcttcggctgcctcatcgataatgtctttcgccttgctggttttcttgtcgtattgcataacatgattcttctttgcagccttatctttcttcatgacattgaaagcgttggcatcgatttcaaagtcaccttcgttattattctcgtcgacttgaacaagttcacttgcacgtcctcgccgcaacattttgcgcttgcgttcagcaatgggcgactgagtttggcccacaaggaccgtgtcgatggtagacatgggtggggtagccttgaatctctttgcaggatcgaatggtgagaatacaaagccctcgtcctgggttgggtcgggcagctgggattgagaatactctgagaaggcatatggtgcaggcgactccgatactcgggtcacactctgcgtgtagctctctataaagttattatcctgggtctgcggctggctgtctggaacaagaacttctgaatcctcctttcgaagttgaggaacaggctgaccagggtctgggagagagaaggggatggtggcagattcttcttgggtaccaacgccattaccatccaacgtggaggcaaatgcctgggtaagacctagggacatatcgcctagtgtgcccatgccaaggaagttgggtcgttcgacggattgcgggacaaaactcggggctctcacaggcgttgagggtgcttgtggttgatcatcatcttcgtcatcgctaactactagagttcgtcgcttccgtctcagggcaggcatctcgttctctgcatctgaaggagcgacctcactctcgtcgtcagccgaatcgtcgtcttcgtcggcctcctcttcgacgagatccccgccaccattgacgcgctcgttttcttcctcttggtcatcttcatcgtccgcttcaacatcaccctcctgatcagagccggaaagcacgtagtcatcatcctcttcttcatcgtcgtcaccattagccttcttcatggcagctttctccagtcggcgaatttcatctccctccttgcgcgctttctcaacaaggttttccatgtcatcctccatcgctgcacgctcctcggctgtttcaatgacaactcccttggccctgagctcatccagccgctcctggcgctccttggccgcttgctgtcgggcccgccataatagatttgcggaaagctctgcggagttcatggaagccatttttcgggtaggagatgccaggtgtgccaatgccttgagcttggtcatagaggggtcttcctgtgcctgtctagtaggcaggttttcgaacgctgcaatgccacggcacttgccaggggatgttatcacctcaagatcgctatcggaatcgtctacatcgttctggtgcgcagcaacctctttcctagaaagcaggacgcggataggtcgttgtgtcagtggtcggaaaactctcttcgattctgcaccatcggatttagattcgggtacagaggccgatacatcttgaactgaagggccctcgaacaattcaggatactgatttggcgccataaggacattcggatcaggcaaaccttcattgtccgtatccatatccatatccacatcttttgcttgagtttgggcatgcccagaattagcggtcgacttagtggaatccaaatgaccgagaactggagaagtatgcggagtgtctttcgttttgttgtgtagttctccgtcagaggaattttgtgatccgaccgctgacgatgaatttgccgcgagctgctcgaccgggggatcgggttgcatgaagttgaatttcgcgaagaggctctccttggtgatcttcttttttgtcttggcctggtgagctaattgcatgttacggctcattcgctgagtctcctgcttcatctcatccagtgccttcttgctggctttccgcggctgacgagccttctgggagagcttgctggcagaacgaggatcgtcagcaccgctctcctcgcctgacactatctgcgaactgaattgttccagctgaacttttcggatggccttcttagtttcggcatcggccttctcgcgctcctcacgttccttgcgcttttgggcaacaagagacaggaaacgggcgtttcctctaggcttcttctcttctgcattttctgtgtcttcgttttcggtgtgtaggtcgtcatgcggttcgcctggagaggatacaaagagaggagagtcggctcttgaacgagaaggggtttggctcgttctgttgtcgggcctgggggagttggttgtggatttgtgctttctcctcggaccggccgtaggtagatcatcatcactggattcgtcgatgggtgtaggttgtggttctgtctgctgtggcttctcgccctgttctttttctgatcgaaaggcctttgacacacgggcaaatgcagaatttccgtcctcggtttcagctgacctggaattaccctgtaaacgagcagccatacggccttttggtcgaaaaacctcatctgcgctagctgattcgtctgagtcgtgcaataggtcattctcgcgtgtattggcgtcccggactaaaccacgccctagatcaagcttcgagacagcatctgttgacttggcaatttgagtatcatcctccgaatcgctatcgaatgctgccatcatggccttgatcttctggccaggagtgataatggtcggcgaatcgcccgcgggcgacacggaacgcgtcgaccgtggtgtggatggcgaggacatggcgcgaatattatggtgaattacggtgtgttttaggaaataattcccatactgatatcaattgtacttggaggcaatctttaagacgtccaagattcagaatgaggtagagtggacgctaggttcaagggcgcatagtctgaacgcgaggcgcgttcctcgcgttgctaggtcatacacgtgaccttatcttacttatcgcctcatttctctcaagcggacgttaattgattattgttacaggcacgaagaggagtagtagatgatattttctcttttaatctatttttgtgagtttttattattttcgaattatctcttcctgtagataaatgctgcgctgctaacatcgaccggagtattgctcatgctgcaagcttgatgccattttctgaatagacgccgagaccacccacagactcctcaaaaatcgcgcaaggaaaaaataacaagcaaaagatacaatacaattcgggcaaggctttatgccagtcaccagaaagaaatgtacacttgttcggggaatcatggaatctcagaaccagagaatctttctcacacgtagtaaatcggttcaccaaacaacagtctgaaccgaagagcaggaaaagtcggcatttccgaatcagactagatctcgatgtcgatgtccatatccagcgctgcaatgttctcgtcgtcggtgttgcggtaagtaatcatgaagccattctttggcttctttgtagtgatgcgaggggcggaagctcccttttgcacggcttttgcgggggtatctttttggttttccacaggagcggcgtcggcagcagcgggtttgggtgttccgttgacatcgtggtgagttttcgccacggttcgcacgcgcatgaagggattcggggcagcctctccacgtgcaacagcctcggctgcctttctagcggcctttctttcctccagctgagcacggcgaacgttctcaatgttaagcttctggttgcgaaggttcatcaagtggactcgttcggcttccgatagaccactatcgacctctttcttgacaaggcttgttccccaggatagggtcggattgaccattttctgtagttctgcctcgattttctcggcctcctccatgtctccgttgaccttggcgaattccaggtttctttcgagttcaagccggttgagcacgttcttcttgtggtcgaaagcaccctggcgacggagtttctcgttcaactcctcccgagtgaaggtgtggttcaggaggcggttgatatcagcgaccttagactcaaccttaccctttgtagccagcttgcaatcctcaacagcgagagtctgaacgtaacggcggtactcggcctaattgactgttagttggcttccaagcttcgaggggaaggaacaaacctcagtaagtggagagttggaaaaagtgacaaatgggaagtctctgacagactttccatgtgccagcttgacatactgatccgtgacaaatgagcggccgttttcgccctccaaggcgtacggcttgccctgagagattcctagggaaatgtcagcgcgcacaaacgagcgaggcagcataagttcttaccagtaatcaggcccaggcgatactcattctggccggtctccgggtgcgggccaatgctcaaccgagcgtagcaaccaatcatagcagtctcaaatccagggtagaagcaaactttggcaaagttattacgtccaatttgagcgcgtcgaatttcgcgaagctcggcgggcgggtcatccttgggaatcgcagcagactggccaacgcggtcatccaattcaagatcactctcggcatcagcatcttcatccgaaatatcagaccccatggagcgcgaacggcggcgcgactttgtagggtctcggcgacgaagttcatcccgcttgcccttttgctcacgctggcgcttgtaggcctcgatggctccggacgtttctcctactttgcgaccaccaagagtggtcttctggcgcgagctcttgcgctggttgtcgtccaagccagcggaccctgcctttcgcttggctttcttggccgctcgtgcttcctcgcgcgagcgagatgctagaaggcgacgtagagccagatcttggttgtggcgatcgacttgctgggcacgttcggacagggtttcctcgcgctggatctcaggcatggccatgatgtccttcttatcctgggccgagtagtacaacttttcatatgggaaaatggggcgatccgcatcgttgtcatccgaattgtcggcctctgactcggactcggacatgggggcggactgaagcgagtgacgagatccatcgtcagacctaaatatatggtcaggttaatgagactcttggctatcaatatggaggggcactgctcacacttcaccctcggattcatccttgggcttgcgcgatcggcggcccactgatttagcagttcctttgcgacccatggctgcaggtgaggtacggtcttgggtgtgtgaagaagcagagtgcgctggtgatttggggggtggtgaagtttcctcctcagagtcacccgccaacgcgagcagctcggcatccaaatcgtctgccattgtgaatatcgaacgcagttataccctctcaacagaaatcaatcaatatgagacctataacaacaggcattcaacagcactatgacaataggagtattcgtactcctatagacttcttccctcctttccaggagtcgttccaaaattggagaagtaggcaagaggggcgaacggtggcccaaaatgcctgttctgaatgaaggaatgtcccaaatttgacagactctctgtataaggcacaaagggagtacagagtggaggatatcgtaaaaaagcacgcatcaacttcatgacgttcaatgccaagcccgataataggcgcgcggtagcgagaaggcggtctaagcgacgaacgcgcgacctccgagcttcgtccctcgaatcggcttcattagtagcctaatttaattcctcgatgttgtctttaccgattctgcgcaggagcgccttgtcgcattgccgatattctgcaccggcagccactccaatctttctcgatttcctcgtgccgtcaacacttaagcatggccaatgtcggcaggcgtcaactaccgccggcacccccggcggctccaaacctctatatgttcttagcaaagagcaacgggaattcatggacggcgctctgcgagtgaatcaagccggtgaactcgccgcgacgctgatctacaaggcgcaaacgcctcagatcgtccgctcatacccgcacctccgacccttgatgaaacacatgtacgaccaggaagcagggcacctgaagaccttcaaccacctcattgccaagcaccagatccgtccgaccgccatgtatcccgcatgggaggtagctgccacatttttgggttggtcaactgcggcattgggtcgcgaagctgcgatggcgtgcaccgaggccgtggagactgaaattggatcacactacaacgaccaagtaagagagattctatcttgggaggctgatgccgagaagcgaggggaggagctggatgaggaactcaaggaaatgctggccacattccggagaattcgcgacgaggaactagaacatctcgaccatgcggtggccaacgattcgaaggaagcgaagccctacgatccgctcgtcgatgtcattcggtttggatgcagggccgctatcaagatcagcgagaagatctgatctggtaattcggaacgcatgtgccggggttgccctgccatatatattttgccgtctaggaccatgtactataccgactacttctctcagtattgctagctatacttaacattgtacattctaattgccggttatgtccgatctaatctaatctatcactcgccgcagggtatcaataaataaccgccttcactaggctcatggtctctgacttttatccccagtgtgtgaccagcgccgctcactcagagtcaatgagctcttgccccaagtaatccatgaagttttgggtgaatctcacaacctgctggtagacctcctcgaatccattagcacccccatagtaaggatcattcaccacctcaccaccgccaatgcgctcgtgcagttttccacccttgccgaaatcgccaaacaatcgcacctcagcaaccttcgcatccgccccatatgtaccgatggcagcatccacgtgcgaccgcgtgctccttgaacttggcttgttgtctgtcttcctctgcagagtcgcaatgacggattcgcgcacatcctgcagctcgcggagattggacttgtccatagcgaggaggtagtcaaaggtgagaaagtcttcccttgtcacttttcgggcggcatgctcgtaatcgtgtattttatggcggcgcagcgtagacatggtgcgggagtcgggcggctcgaggctgtgataggcggctgtaccagcggagtcaatctcaccgatggaggggtgggcgccggccaggttacggaacactccttcggccatgggagaacgacctagacaggattagcatgtcgtaatagcggagaagaaccgagttgatgacgaacagatgtttcccaggcagacaaataacactttggcgggacgcgcattcgagtcggaagccatggtggggtagcagggatcacgaaggaatcttgattttaagattttcaagatatgcggagcaaggaaatatatgcagaagtaagaatcaaagcaggcgatagtatacaattttcatgagggtcgaatttgggtgcaaggcgggggacattgatagaccctggttggggtctccacccctgggagagccatggatatacaaccgttgtcttcattcgacgttgacttgcattgctacacatatgttgtacatcataaagcaggaacaagcaagaaatgagttgtagattggcagctgtctattttatttttattttttcttccaattaaaaaaagaaaagaagagtacatagcccactatgtcacctccaatgacctcagatctaaaaaaagaaatcgatggctgaggggggatgagccacaggtgacaagcccgtgtggctgagttccagtcagttggcccagtaacaccgtccaagtggagttcgtggagtttctcctcttcaacaacccgtggctcactggtttcagcacatccagggttcctgaattgcaatatcattagggcttttatttctgaatcggaagaatctgttcccccctcttgccccccgacatctctacggtgtatgcaggcctaatcagtgtacggtatctccacaaggcacaaggcagtgcggagccgcacagacacatctgattcgccccagatccaccatcgttgccggaatcaaaggcgtcgtaaacaacagtgcggccaagccggagttattccacattttttttcaaagctgttcttcttcaccctccgcgctgtcttgtgacaacccaaaatacatatacggagtaccatctccttatatcaattttcgcttgcgatctcccttctgaaacaacgccgagaacttgcatacgtcaattggactagtgattcctcccgctgacgcttaaatcccactcagcgctcctagcgcaatctccaacaaccctgttacgcacttggggcgggataatttcgctgaactcgattctaaggccccagcattatggcctacaatcgtgtggacgccggtcagtgcttctctagttttattggacctttcctcctccctctctcttttcagcttccccgcgcattctccatctttctgaactgccgactcagtgctggtcattgattcaatggtcccagtacgatttgcgcgatcaaatcattgctactcaagctcttattgagcaatcttctacgtcgcaaaactaacaatgccgccaacagacccgttcggagacgagcatacctcgcccatcttgcatccctcccatctcaccggatacagccatcgccctccttccccagggcaaccattggaacctggctaccagctctcggacaacccatatacatatgcgccccagtcgcatcttgtgatgccatccagtgatcgcttggccgaacaacctactgtgagtattatgagataagagcgaagattgctacgatgagtactgattatctatctaaaaagtactcggtcgaacatgttgatagctcttatggccatcatcccgcatacgacgcacaacgtccctaccctggtcacgagtattcgcttgaccctgaagcccatcacgacgcctactatacccaaccctacgagccgacacaaaccccacatgatgattatgatctaggccagtacccagagggaggacaaactccctttgaagctgaccagcccatcctgcaaacgggcgaaaacccctttgggccggacccatacaccgagttccacgatgaaccgcgcccgacgcccagcccagcgcctcttcgccgctggaagacggtgaaagaagtccaacttttcaacggcaacctcgtccttgattgccccattgcgccgcgactgctcagccagataccccacgcagaggccccaggtcgcgatgaatttacgcacatgcgatattcggcagcgacatgcgatcctgctgatttcttcgaagagcggtttaccctccgtcagaagcttttcgcaaagcctcgcaacaccgaactgttcattgccgtgaccatgtacaacgaagatgacttcctcttcgcgcgcacaatgtctggtgtgtttaagaatattgatcacatgtgttcgcgcacaagcagcaaaacgtggggcaaggattcgtggaagaagattgtagtctgtatcattagcgacggtcgtgccaagatcaacccccggacgcgcgctgtgctggcagctctgggtgtgtaccaggatggaattgcgaagcaacaagtcaacggaaaggacgtgactgcgcatatttacgagtacaccactcaagttgggttggaggtaaagggcactcaagtgcatctcaagcctcgatccggcccgcctgtgcagctgattttttgcttgaaggaaaaaaatcagaagaaaatcaattctcatagatggttcttccaagctttcggccgtgtcttggatcccaacatctgtgtccttttggatgcaggtaccaagcctggcaaagactcgatctatcacctctggaaggctttcgatgtcgagcccatgtgcggtggtgcatgtggtgagatcaaggttatgctgtcccacggcaagaaattgctgaacccgctggtggctggccagaacttcgagtacaagcttagcaacattctcgataaaccgcttgagtcttcattcggtttcattactgtgctacctggtgcgttctccgcctaccggtttgtcgcactccaaaacgacaagaacgggcaaggtccactagagcgatacttcctaggcgaaaagatgcacggtgccaatgccggtatcttcacagccaacatgtacttggctgaggatcgaatcctgtgcttcgagattgtctccaagcggaagtgccgatggcttcttcagtacgtcaagtcgtcgactggtgaaaccgacgtgcctgatcagatggccgagttcattcttcagcgtcgtcgttggctgaatggcagtttcttcgctgcagtttacgccattacccacttctaccagatcttccgtagtgatcacagcttcattcgcaagtttatgctgatgattgaattcgtctatcagacgattgcgatgattttcgcgtggttcggaattgtacgaatctctcccatcatttttttgatatatgctaacgccttgcgcagggtaacttcttcttggtcttccacatcttgaccacatatttgggctcagatgatctactgggtactgctggtaaagttctcggcattatctttgagtggctatacctggcaactctcgttacgtgcttcgttctagctctcggtaatcgacccggcggatcaaacaagttctacatgaccatggtatacttctggattgtgatcatgatataccttgcattcgctgcggtattcgtcacggtcaaatcaatccaaacagaggtcgaatcgaacacctttacagtcagccaactgttcaccaataagacgttcttttccatcatcgtctcccttggatcgacctatgtcatgtggttcctcgcctcgttcatcttcctggacccatggcacatgttcactagtgtaagtgactatatgaatttaatcttgtacaatcttctaacatcctccagttcattcaatacatcttgctcacgccaacctacatcaatgtcctcaacatctacgccttctgcaacacccacgatatcacatggggtactaagggagatgacaaggccgagaaactgccctccgcgcacctcaagcccggcggtaaggtcgacgtcaacattccacaggacgacggcgatctgaacgaccagtatgatgcggagcttgccaagttctccatgaagccccccaaggagatcacagttatttccgaggaagaaaagcaagccgactactacaagggattccgcagtgccgtcgtgctcgcctgggtattctgcaactttgctcttggtgccgttgttctgagcgctgccggtttggaaaccttcgacgacacatccactaccagttccgatgatgcgcagaccgaacgctccatgatttacatggaagttgttctctggagtgttgctggtctttcgatgttcaagtttatgggtgcaatgtggtatctggttgttcgtatggtgagttgtcttcctcgcaaggtttttttttttttcattacgtactaacattatattctagttccgtggcgtttgattcagcgagctcttaaacatgatgattgtgttcctttgcgccaatgctatgttttcatatatcccctgattttatccggatttggtcttggttacaataccacggcgggcccggtctggtacgcaaatgaaaatggaaatggaaatctaatatgtttgatgacttcccagcgatgtgtttttcgtcctttgtgacacgcggaatggctgttttggttttttctttacatctcgacttggtgcatcttttgcatgtgcttgcccttgcatatgtatccttgggctcatgcttttgcttttattttatggagtggaatttgtgtactctatctgtcgatatggaggagaatattatttccgccaattctgtgttcattgcaaagaaactgtatttttgtaggtcaacccgaagcatcacatgaactacgcaataaaagtcagggtttagttttgcgaggtttcaattattgaatatagtgatatccttccattaactatgaacttcactatgaggtactaaaaaagcatcgtccaacaagtgtctagtgcaccaagtaaattagcaccaactccgtaacccgaatcgaacatgatttcaagaagcctgattcttagaatgcacacataatgcaatccctccaagtaccagccccatccccaaccaagtctccttcgcaatcaccttgcggtcaacataccactccccaagaaccgtaaacaagaacgcactcgagtttgccagcggcacagtcaaagaaagttctacacagcaatacattagcaattccgcaccccaaacggcaacactagaacctgagagcaaagaaagccaatagcactcaccatgtttcccaacaagcaaaaaaaaccaaatactgcccgtgaggttgataaccaagggaatcgcatatgcaggtgtacggagcagattaacaaccgtccagaaaacagaaacaatcttcgcccgcagccacgactgcttcaccggacctccatgtctccacgccggcatgggcacatcgtcctcgtcctcgtctgcgccgccttccctgtcttccctatcacggctcccgctctgttcagcaagtccagtatcctgacccgcggtcttcggtttccggttcacgtcactgctcgtactccgtcttggcacatcggcaccggagtcgctgtcttcttcttcccgagagagcaattcctgtgcctcgcccgcgtctgtgaacccggctcgtgccgagtcttgtgagcgtcttcttctgcgcgctgaggtgtttgggtcatttgcttgcttcgcttgccgggcgttgaagtctgctgctgcgcgccggataaagggggttgtgaagccccatgcgacgccgacgaggaggaaggagagcacgtagttgaagacagagggggcgggttcgatggggattccgggatctggatccatgttggtgttttgggacctcgaagggtgtgtaacgattggttggtttgttgcgcggtgttactgcggccttgacgttgatgcagacgtggaccgttggtctgtgcgttactgataagacggataaggtttctagtgacgatccttggatctataaaatggatccaacggttggaatgctttattttaaccacagtagattgatatagtattgaagagactgagtaaaatgataagatattagactggttcgcctgttagggtttcacaccgtggaggcttcaatcacgtctgaacgaatcgacgaattgaccagtcaattgccaacaacccacaacccacagccaacagccaacagtcaacggacaacggacaacggacaatatataacaaccaacagccagcaaccagcaaccagcaaccagcaattagcagccagcggccagcggccaacagccaacagccaacagacaacggccaacagccaacagacaacagacaacagacaacagccaacagccaataaataacccacagcccacacccacaagctcacaaggatactgcacaagataagcatcaagtgcagaatttgctctcagtaggtcaattgcgagcctccgatcaagcttgcccggccgtcacagagggtgtcgccacgtccgatggatgtgcatcatcaagaccgattcatcacagagcaaagtgcccaccaccctccttctcccccgaacccacttccaccagagtccacagcaccagaagagcagatctcctatgtccgttgcttaggcgaacgccgaggcttgagaagacgaacgccccactgtgtccgagaaacgagtcctggtgtgcttcatatctctgacgcgctcaaacggtcgcccgtgcagcgtccccctatctctcaccagcagctcatcctcctctttatgtgtcctcactggcatcttgaaccgtggcagtccctgccaaaccccaccgttctctcaccagcagcccatcctcctctttatgtgtcctcactggcatcttgaaccgtggcagcccctgccaaaccccatgtgtcctcactggcatcttgaaccgtggcagtccctgccaaaccccaccgttctctcaccagcagcccatcctcctctttatgtgtcctcactggcatcttgaaccgtggcagtccctgccaaaccccaccgttctctcaccagcagcccatcctcctctttatgtgtcctcactggcatcttgaaccgtggcagcccgctgcccatcccccttcagtgccgctcgtcacaggtgagtctgctgtcgaatgcccccgccagttgtcctccaccgtcgtcccccactgtcgtccccgtcgtgtccccatcgttccaggtgagtctggtgttgaagtgttagtgtcctagtgttagtgttgttagtgtgaagtaccattgtcattgtcaagtgttagtgtggaagggttagtgtagacgggtaagtgtaggagggtaagggaggaagtgttagtagggtgttagtatggaagtcctaatatggaagtgtcagtatcaaagtcaagtgccaagtgtcaagtgtcctacctggtgtcgaagtgtcgtggtgtggcggtgtgcggtgtcgcaagcaaagaaaggtgaagtggaagagaaagaaagagagaagaaggaaattggggggtagggggtatttatagcttgtgggaaacagcacaacctctgaaatgggaaggcacgtaaagacctactggcacgtgaaataggcaggtgcatgtcaataccctgtcattgttacctcaatcctattcaagaacaatggatatcatggtttttatatgtcctacttgcttgcccgggactctagatattcacgagatagtcaatgtattgtcttagctacagtctatagaccttgaggatgtcccgatctgaagggcccatccttcctgctgggtcgttccttccctttctgccgaagagctaagcgagttgatcaagagtttgcatgatttgcagggaggcacaccgtaaagcccttcaccctacaccctacaccctatacgcacagatcctcgtccatatttctttttgctctcttgtacttaattttttgattgaaatgactgcactctttggttttaataagtggctcgtcgtaggagacatcgaatatcaaggcacggtctgtggtagattgcacatgtcacgctattcatatctaggaattatacgctacgggagtcacccaagtaaccagtaagatgtgtagtatctattagcacgtcctgtgtgagctttcgtctttaattctctcagagatatatccagttgcaccatatagtccgcgatgaagaaccaatgctaatgagaagctcattatccacttgacagattgggaggtcggcctactgtggagatgtgagcatggctcctgagaatggcttatggtactttgcagtatgaagaagcttaattttacggttgcaattggtacttgagtagaattaatttgacacgaacgggtatcatgaagtgatatatatgccaagacatatatatgtagtgtattaggacaatgtctctatgcaacgcagtgtaaaagactcgatataaccaaatgtaacatagatatacagcaacatcagtagctggcccaaaaaaaaaaacattagaaggaaagacaaaaacaccgaaaaatgggaaatattagcatggaggcagtgacacaattacttggcactcttcgatttcttcccaggaatgaatttcatcatcgaggccttcagatccgcactgttccaccgcttcacgcggacaagatagtacatgagggtagccacgaaggtgttgaaaagaatgaaagcccacataataccgaagttgcgccaccgatcaccgtagtagataccggccgtttccatgaactgatccgcaactttgagagagcagtagccgcactcactcgtggcgtcgggattagttatctgtccaccagcggcggcggcatacttcatgaggtactgcccgcaagtatagccagagggaggattgaagatggctagttcggcggtcgagcacaccacctgacgattgtgaagctgtgtgcttgccatgccgccgatccaatatgtgaatggcgagacacggtacatgaagatccagaacccgggaagagcatcggggggctgcatcacaccacagaaggtgagagacatcgcgaagagaagaacgactactgcactggcggtggtttcatctgggagaccagcaatgaccatgtgggtgaaggtgctggcgtagatgaagaaaataatgcagaacaggaggacggttccctgggtcagcgaatcggggattccaacgacggcatagaagtaggagccataggtcaatatacccatgatgaccatgtagggcagctccacaaccatgttggcaatgaggaaagctttccaggagtaggatttgctgggacgttcacgtccctcgtagagcgatcgctggctgacgaagacgggcatgatctggtgagattagtgcatgttcactcgcttgattctagatttggcttacctgttgcgccaatgacgagaagattgtacaaatcatgaacagggagtagacgacagtctgcatgccttgcagcgatgttttggcaccatagaaagagaaaccaatgaatagaccagagacaattccaagcccccatttcgccagaatgtaggctggcatgcgccagtattgttggaacacgcggtatgtgacttcgttaatctggaaccagaacggcatggcgaattcagagtgattttgtgctgaatcatcagtggcggggggttcattttccttttctttgtgaattcgattgatctcattctggacctccgtgctttcgttgctctgcttccacacgtcgaaccagtccatgcccttgtcattctgaccagcgttgacaatgcccagcatatattcagctgggttctcgttatccgcacacttccgcgcaccgttggattcgaagtactcgagcattgtgctagagttatctccaaccggaccgaagtacacggtcttaccgcctcgggcgaggaacagtagctgatcgaattgttggaagagcatggcgctgggttgatggattgtgcaaagaactgcttggccgtgcgaagcaaggtcacgaaggaatgaacaaatagcccaagaactctgagagtcgagaccactgagcaatagttagcatcggtaaggaatgaatttgttgtatagggtacttgcctagtaggctcatccaaaaagagtagtagcttgggtttggcggccaattcaacaccgatagtcaacagcttgcgctgctcgacgtttagaccctcaccaggaacaccgacaatggcttcagcaaactcctccatcttcaacatgctgatcacatcttcgacataggcatacttctctttaaccgaaacggaggctggctgacgtaacattgcactgaatcgcagagactcacgcacagtagcagtatcgaggtgaagatcctgctgttggacataacctgtctttcgctggaaactctgatccagtggacgaccattgacaaacatatcaccagtaataacacccatcgatgtacggtgtgccaatacatcaagcaaagtcgtcttaccagcgccactgacacccataagtgctgtcagggttccaggtttaacccatccagaaacattgtctaaaagacgacgcggctcgcccttaatctcgatatcatagcacacattgcgccaagtgaaggtatctgtctgagcctggatagcacccattcctttttccccagtacccgcagcagcgtggtctttagttgtctcggtgctttcaacatcagatccagacttatggtcctggcgtaaactggcaggctcgtgaccgcgacggaagacgagagcttcggcggcacttgtagtagcagagttcagctcggtcgcgataaagtagatggccatgaaagcgatcaggaagcctatcaggataccaaagtttcgccagacgtgggcgtagctgtagttgtagttcagtgccatgaaccggtcaccgttgactgttgtggcgcctgccagcgaaccaggtgcagtgcaactgaatgcttctcctgataggtcggcataggagggaacgaagcttgagcaagggaactcgcgagcatggaactcgttggcaaccagaatctcgaaggcgtagaagatcggattgagataatgaatccaattgaaccatggatgcatagacggaatagggaggacaaaaccggtgtaaaccacgagaatcaaaatcatgacacctgcaagacccattgcctgtgaaatagtcttggtgacagcggccagtgtgcggaagattgcactcatgacgaacgtgatgatgaaagtgatgaggaaatagaggaagaagttggaaggttctcgttgcagaccagctagaaagtataggatgatgttgaacacgacagataagacaaacttgactgggatatcactaatcacaccagcaatagcttctgtgaagggatgataaaaggcaaaggaggcatgtttttcgacgattgggcgttgtgaataaagattgttgatttcggacattgcggtgagggcattgagcaggacggcgaagaatagagttgcacatttcgacgtaaagcccacagttgcattcggggtatcgtagaagacagatccaatgatcaaagccatgataatattagtgaccaccacagatatggtggaggcagcatcgttccagagtcgttggtaggcgcgaacggtgttgagtctgatttgcatataaacgctgatgatgtatggagacttgggtcgagtatgtttggcctggacgccacgcttccaattctgtaaatcagctagggcttgcacatcatctccaacaggattttgtccttcatattcagcaatttcatttagcaattgcttgtattcaggtgacttcagccatgcagcctcaaagtccgcaggagtacggggaacacgattttccatgccaggcttggctctccgctcctggggattcgagatcgaagtgaggaaatctccagtggtctgccgcgtcgggcaatcccagccctggttctcaaagtaagacttggctgcggacgcagctccgaagaatacttggtggccttcgtaaagtacaatcaccttgtcaaatacatcgtagatgctttgactggcttggtaagcagcgactgcttgacacgcgccagtgatatcagaggatagtcgcaaagcctcgacaaacttcaacgcggtggcggaatccaatcctcgagtggagttgtcccaggcagcgattggagcatgggctagggccatctctgcaatactgacacgctttcgctcaccaccggaaacaccacggatgaaatcgtctccgacgcgcgtgttgtatgtgtgactcaatccaaagacagccatgatgatctgggccatatatttggcaaattctgcgcgcgacatgccttggaaccgatgggcgggagttcgtgttgcagctgcaaactccaaagtctgaccgacggtcaagtgagggaagtgtctgtcaacctatagaattcaagattagcgatattctcattggcgtggtatgttgcgactgtacctcttggttgtatactagttcgcccttgaactctttcatcatgcgagtttgaggaattcctaatgactgttagctttaactaaaggatgcgggacctcaattcttaccattgtaatgaatgacactctccttgtccatcttcaaaccatgcagctctccagtcatggacttcagtagcgtactacagccggcacctggccgaccaagcacaagcagcatctcgccactttttaaaatgccattgaagtccttgaggattcgcctttgaggagagtgtgattcacgaatgatttggggcaaccgaaagggggcggtcagggtcgatgtaactgtatcttggaactgcagcgcagcgcccgatccgtatatgttgaggtttttgaaaacgacgtctgatgtgtgtcccgctgggccatcccggttgaggtctttgaaagccgcttttagccatttttgcaagtcgaactttccagattgggggtcgagagctggatcttgttcggcgagggcttctaggttatccgaggttccaggggccggttgccggtgtgaatgttcagtggctattctcgtgagggtgtcaacatcgttttggttgatgtatgtcatggactggactctcccgagagtcgatccggtatggggtggttgttcatccttttccctcagctcgaaggagtctttctcggacgtcatcgtgccgagatagaataaggaacgagcacagggaggcttaaagagaaattaattataatgagaaatcacacaaatgcgggcgcgatcagatatttaaagcctaggcactacgtttccgtttttggatgacatcttccattgtaatgagaactgtgggtcggagtcggaggtcggagcaattgaagacaatggaagagatataagtggagttgtgccctgttacgatattacgatcccaggacaatgattcggcacgggatacgaacagatcgacatcgaatcgggctcgccaagttgcgccaagtttgccgtaagggacctagtcgcgataactgcatccttaactgcccgctagaacctaaaggttttctaagcattctgctgagtcagcggcacttttttcgaccccgggacccggaacacggagataggcgatcccgagcctcggctcccgagcttatgcgaagccgtggacggtacgcgctgtacataaatccaattatgatttgccagacgcagtagagcttgcgagtgcatatctaaaatctttgcgccccacatttttttccagtatccctttattgattattattacagaccatacctatctaagactcggaggaaaattcggtcaaattgggcctgcatcggctcgggaacacatcggcacccattgatctttgaaccctgagacccgttaagccgggactaggcaccttacaacatatacactacgtatacgagcacggatgtggtactgtacaaagcacctggatgtggcgactcttgtgcgtttggtggcttcattgttggcttgcaagattgcttgtcgccactttttgatccgtacctggtggagcgcagattaccccagtatgcatatatgtaaggctcctctacggagtaaacaatgtactgttttcgatagactatattgatctcgccgtgacactatctatatgttgtagtgaatagtaccgaattaatgaagaatggcactcgggggacccgtggactaaccatgtctcgcggaatcatgatgcgattatgcatacaacgtacgatcacatgctatcacatgctacaggttgtcttttgctgtttgcgcggtttgacaaagtggggctgggcttgctcgtgcctcccggaggttccagggttaccgttatctccgttatctccccatactattttgaattgaccgcactcttcagtattcaaagaactggcttataacaattaatataaaagtcaagcgatcaattcgaaaagccagctccatagcaagagctaagtgcaggatctaattgcaaggcttacctcgccggaatcaacaacacggctggaaagtcgtggataaaggggttatttacatctacatggttggtaaaccaaaaggagcaaataatggatttaaaatagtgttcattgttcatgcaaaatcattacttccccgtcgcctccgcgggtattgaactcgagtgagaacgcaagctgaaagcagaccacagccagtgagaaaccaattaccgaagatcttgttgggattcgggatcgatgtctccagaaaagatggagttgacagatggcttgtaggcgtggagatagttggagttgcaagccaagacgtcttaacaatatccgaagcaagcgtcgatatcgtgattcgagaggctgtgtatcggggagtaaatgtctgacctggagtctaaactgcttggtgtgactctattggtcgcttgatgccattgaggtcgaccatggtggcaaggcatgtgccagtgatggttctgcaaaaaggcttggctccagtagagcgactgaaagaagacaatatgaggatgaggatggggataaaggatggggatggggatggaggtggaggtgggaatataatgaatttgtccgtgacagctgaagaaagccgttgtcgtccgagtcgctttgcgaagccacgcccggttgttggtttgccccgaggcaacttacggtgagtagcatttaaactaccggccggagtgctttcaccataagcttgtcgactgagtcgctttgcgaggccacgcccagttgctggagacttgcagtgggtagcatttaaactaccggccggagtgcttccactgcaagtctgtcgaccagaacggttcctggctgctgggttgttgtgaggcgacgaggggagggggatagggatgaggtggggtggggcatatggagtggggtttgggggagagggaggagatttgctagaaacgagttagcgagttcaaacatataagaccaaagaatgaatgcatattaccatgaacagttgtagtagaaggttgctggggccaagagggaagatcacgatggaaggttcttaggatgaaaggtcattgtcttgatgaaggttgttgtcttcgaagaaggatgttgtcatgatggaaagttgtcataatggaagtgtccaaggttgacatgttagatggtagtcaaggtcataatgagttgacatggtggatggttgacaaggccgtagtggaagattgtcaccatacagggttgtcaaggccataacatatggttgacatggttgaaggtggtatggcctgaggttgacatggttatagtggatggtatatgaaggccattgaaagtggaggtgccaaacccgagagatgcgaaggaggaaagaaagagaaagagaaattggggggaagagggggtatttatacccttccagtggcttaaggtcatgagaaactggggtgggtgacgatttttgaccagaagggaaggaactagggcaaacctgcaaaccatctggtcgcaccttccaatatttatccgacatgtgacagtcgaagctgcactcgcgctgtctatcagtggacgaatctacaaatcctaggccaattagcaaaaactactagtctatacatcagaggtatcaactttgcctatctatatacactccaagaccggcgtgactgttatggagtgagttattgaggctttgatattttagaccttgccatgaggcagtaaatcaatggagacagtatattatgtactcttcgccatatgtttcatgagcaatttctttttcaattcgcaagttacatatatagtcgaggcttcgaaggctactcggacagtgcttctattgccacatagtatacattattgtaatttgtttgtctgcagtacctaatatgtactatcaagagatatatgtagagaatacagacagattcagcactctaagccgttgctatattcataaaaagcgcgtataattgttttgggatgatttcggacacctggggatgctgagtgtaaataatgcagaatcttagctaagcaatcatatatccatccatggaacctagatcggtacctaaatcaagtgacaggccaaatggaaacaggattctaatcgagaccgatgtcagcggggcagatcggcgggctccgatgggaataaaacaaacttggaagccctcctcccctctttttctcttcatgagcccagaaatatcatctcaccatggcaatccaatcactacgtgaaatcaacgcttacaatctgcgcaccttcaagcaccactatgtctccgagatctcaggctcgctcggcgatctaggcacattcctgcctatcgcgcttgcgctagctgtcaacggcactgtctccctcgccagtacattgatcttctccggaattttcaatattctaactggtctgttctttggtattccactgccagtccagccgatgaaggcaatcgccgcagtggctatcgcgcgcagtttctcaaatggcacgatcgctgcagcggggatcttcgtcggcggctgtatccttgtcttcagcttgacgggtatcttgcactggttcgccagtgtgattcctattccggttatcaaaggtatccaagtcggggcgggattatccttgatcatcgcagcctgcagcagcatgctgcacccattgggctggaccagcccctcctgggccgataaccgtatctgggcaatcgctgcatttgttgcgcttctgctcaccaatgtttatcgccgagtaccctatgcaattgccgtgttggtgctaggtctggtgtttgccattattcggactacagtcgctggacatatgcccgctttcgaagtgtggcatcctttcgctctggttccgaccccacatcaatggcgcgtcggtgctgtggacgctggtattggtcaaattcctcttaccaccctgaattctattgtggcggttgttcacttggcgagtgatctactgccggatgtccgcactccgtccatcaccaacgtcgggttgagcgtagccggcatgaacttgattggctgctggttcggtgctatgcccgtctgtcatggttccggtggtcttgccgcgcagtatcggttcggagctcgctcgggagcaagtgtgattttcctcggcctgttgaaacttatgattggccttcttttcggagagaccttggttgacctcctgaagcgatttcccgctgccttccttggtgtaatggtcattgcagccggtacagagctgcttggcgtcggcgagagcctcaacaccacgggtgctcgggacctcaaccagaccggtggtggccttgtgtcgaacattgaacagcatattggtcccatgcttacagatgaagaacgcagtcgtcgctggactgtcatgatggtcactgtgggattactggtaggattcaaaaatgatgcgattggcttcattgctggtatgctttgccactggtcctacgacatcccgaaatggtgggagcaggcgcgtagccgctggtcggagggacgtctacgtctacgtgactagaaataggtgtggaatttcggggtttgaaatctcatgatattcttcacaatatatacgtaaagaattcacagatatgcattttgatcttttttatatatagcaaaaacaagcgcaattactcaccataagcaaatgcaggtcttcaccaacacactcaccaacacactcaccaatacactcaccaatacactcacctatagtacatccctaacatccacatcacttcctctctgtagcctggtacctgtactaggattctcataagggcggtcctccctcgccgcagacgaaaagccatccgaagcaaaattcacatcccgtccaaaccggcgaccctccctatggcgccgagtaacgccccctatatcatactcggagtcattataattgcccgtcacggggtcataaaccctagaccccaatggcgaagaaaccaaactaaacgaatcgtcctcgccgtccccatccaagagctgagccgccgcacccctaatatcagccatgacattgggcgcggaatctggggtcggggtatctttggaatctgaaacgtcatcctctagttccgtgatgcgccgtattcctcctgcagagctaccgccaggctcgggtaaagctagctgttcctggcctgtattgtcgtatcgtcgttcttcgacgacggccggttggcctagatcttgctgggctgtacgcacgactgttgagccgtcgggttcggtgtatgaagttgtcgaatacctgtgtccggttgtagtcctgccgtcggtgccgttggttgtggaactgtagtagtacgtggagcttatgaaggagtcggacatcgtagcggtgatatgtggaaaagtaaaagattgatctggtccacttgggatgatttgcggtttttgagttttgtttagttgggtaaatggagaatatagaatactaaacctttggggaggttgttttatttctttgcttgtagaagcgtctccgtaagatgtcgatatatgcaatgtacaagttgtactggttgctttcgaagttcaaaatgttgaatatcgatgcgtttatatatttcatcttcccctgtcctgtggcaagctttacttgccgcttgcatcattgcctcgtgcggcaaccaacctctatggaagaggcaaagacccatccgcgtcgccgaggggtctggaggtaccccacgagaatagagccggggaaacaaagcatatattgaacgtctaggcgttgtccatagatgcgcgtgcatggatgaggtcccagataaggtactgggcgtatcaaaacggcttatcatctcccccgcttttcaacatcgaaaccaactcatctccaactctggaacaaaaagcacttcatggctggacttaccgaaactcaggtcgcctccttcaaggagaacgggtacctcgtcctccccaactacctcgccccaaccgaagtcaccgctctcctcgccgagacaaacaaactccttgaggaattcccactagaatcccaccccctcacccagttcacaacgggcgacgaaaccgccgaccatgtcggcgacgactacttcctaaactcgggcgacaaaatccgcttctttttcgagcccgacgcgttcagcaccgagccggatccagtgaccggtcgcgccgcgctcctgaagcccaaaaaccgcgccgtcaacaagatcggtcactcgctgcataccctatcgcctcctttcaaggccatctcgctcaacgagcggaacgctgctgtcgcgcggtccctgggattcgtcgatccacgcgtgctgcagagtatggttatctgcaagcagccctcgattggtggggccgtgccatcccatcgcgattcggagtttttgtatacggatccaccctctgctgtgggttggtggtatgcgctgcaggatgcgggaccggcgaatgggacgttgggtatgtacaaggggtcgcatacgggaaggaagggtggtcatattgctaggaggtttgtgaggagggagaatggggcggggacggagtttattgagaatcgggggcctgcgctccccaaaggcatggaggaggagaagagtgaggaggctacagatgaggatttggagattcttgatattaaggctggatcgcttgtgctcattcatgggaatgttttgcataagagtgagaagaataccagcctcaatagtcggtatgcttataccttccatgttattgagggtgccgatgggtgggagtatgatgtgcgaaattggttgcagccgcctgctggtgggttctcaaagttgaatgcttgatacacagttagaatacgaatgaatgatgttacggtcaataatggtaaatagttcgacttttattctttatgcaaatcctgtacaaaagatggcccgccatatacaccagtgtgcgaatcccagacaccccgaactccaagttgcgattcaaggctgtcagatcaggtcgccttcaacatgtcaagcattccctttgtttgccacgcttgttgggccatctccacttcgtcacgcacccggcggtgcagacgctccaccatcttgtcgacctgtaccgactggcccaggtttccggagtagatatcgagaaggttcatggcgacctcgacgctaagatcgaccaggcggggttcacggatgttcttgtaaacccactgcagcacaggctggagggtgacttcatcgcggtccttcagcgaggcacggagggcggagcggtggcgcagggccgtaagcagtgtgagttgcgaagtcttgtcagccgagctgaggacctggtccaaagcaacagagtagcgtgccttacggagatcgttctcccaaggctgttctctcttacgcttcttgcggtcctggccctcaatgacaatctccacaccttctccgatgaaatcgcgtccacgtagacgcttttcccatccagagccacgggtcttcttcttcttagcgacttcccggtcgtgctcctccaatttgccctccagcagagctgccatttccttccggcgttctcgctccttgatcttctgttggccagatagtcgggtcttgatagacagaagacctgactgcataccaacagcaatgtgcttatcctcgtattctgttccggaagtgatcgcgcggagagagagaatgggtgatgggtatttggatccggagacggggttccacccagtggtctcaaagaccttcatgtgtccatcgagggcaccactgagcaatcgctcaccattagaggccagcgcaagggcagtgacagtcttttgatggctctggatcatgtgcagcggcttaccagccacaatatccagcaccgcaatcttgttatcggccgcagccaaaactgtagttccggcgggcataggcagaatagtctcaatcggcgcacccatcttgaacgtcatagcggcacggtttccaactcgaggatcccacagtcgaacagtccgatcgtaagaacctgaaaccaccagaccagaagaagccatagagccaggcatgaatgcaccgctgcgcacgtaatcggtgtggccgacaaaggtgcgcgcactggtttgcgacggcaagtcccacaaccgcactgtacggtcatcactggctgtgaggaccgctgtagggtcgctaggagagaacttggtcacccacacaggcagcttgtgatccttccacgtcttgaggatggcgcgcgatttgacatcgaaaacttgcacggaaccggtgtcgtcacctgcaaccaagacacgtccatcgggacgaacgtcagtaccgcgcacggtgtcgtcaaaccgtgtaagtgtccgcaggagtttccgtgtgcgaattgaatagatctggactcgtgcgcctgttgtcacagtaaagacatcgggcggttgtgtgagagaggggaatgccgcagcagaggaaggaacggagggctgagtgatgagattgaccggtccattggccggtgacgggatcaggagcgggtttttgaatgttcgccagtattgttgctcgggcgttagctgcgtcgagggtaacgaggcgagcttgacctgctgcagaggcaggacgggcgccgccatggttgcagtggtggatagacagtagttatttggggggtgttaatcaggtgggcaacccgaaataagcaacaggcgataatgttaagccgactagagtgctatcatgaagttcatgaagaccatcttttttctgccgatcaaaaaagttcgtctcgcccaatcgggaatggtggcggtagcattctctgcctgaggcataatgttctgaatttttgcctgaggccacacggcagaacatcaactcttggcattcttggcattggctttgactttacatcaatcaaagaaatggctgacacagccagagcctagactggacccctcgtaagatgagtctgagggaaaataaaaaatgaaatgtaaaaaatacctcggctgatactttttcgcccgagccattggaagttctctgcctctgatttcaatgaggctggctacaagcaccattcctcggctgacctgccaggctacataatatattccattctcgggtaatacatcatgtaccgagtacgaagtattaatgcttttacatatgtatcacattcatcagattgatcagtctaaagagattcccctcagtaagcccaactttttttcatcacttgacctaaagataagctaaaaactagtggatggatacatatgcatacaaagtacattgtacagcataggcttccgcaatttaaccatccgcaatgttaataatagtaaccttggtgggtattgattgcccaacaagcccacttgaggcaccggcacaggcaacatcattaatcataaagcgtctagaacccgtagaggatgagcaagcgaggcaagacagtctcaccaatattgccaatgtatgaaaggcatctcgaatctcactaggactgtgagtggccactagtcaggtcaatctccagtgggggggaaacggagatccatcggggtgcagctgcctaaccctaaaggtggggaggggagccgcgacacttcacagcttattgaagcccaaatgccgctggaaccggcactttttttttccacaggcaagaggaccgagaatactcggtacgaggcactgtagatgaatagcgatagtgtctgggccatccaatgatcggcgatatacaatataaatctctgaacccgcggtggctgggaatccgatgaggccgcgggatcagatcgcgctgagggatccactacatgcgggaatacctgaccggggttggccaactgaagatgagttgaatgacatcatgagatatatcgcagcatacacgaggattaatatacaagataggattgagaatggcacgaggtgcaaatagagagcgacttacctaacccagtggcttcctaactcggtagcggtggtcgtagcttcccagttccattgtttactcgcatgcaaggtttgtgtatccatggtatggatgaatcgccccgtccagacaccgccaggggtagggaccaatcatatctgaggatctgttacaacccccccagccacctccaatccccgtataggacattctaagagtatgttttctctttcctccttccccctctccacactgtagacattgactctatggtcttttctgctcatattcaatacatccagtgattagcaactggtcacgaaatgtcgaagatctccaaggtcaaccatgcagcaggcatcttcgccgacatatccgtcgatggccccattattggcacattggtcgctatcgttgaccgagcgaagaacctacccaaccggaagactatgggcaagcagaatccctatgctgcagcacgactaggcaaggaggcaaagaagacacaaacagacttgcgaggtggacaaactcctcgatggtaagcattgagcctgatagatgtacaaatggaagataagcttacctgcctagggactcggaactccgatttaccgtacacgaatcacccgactacttcaaattgaaggtctccgtgttcaatgacgataagaagaccgacctgatcggtgaaacctgggtggatttacaaagcttgatcattccgggtggaagccaaaatgatcactggcacccacttcaataccgtgggaaatatgccggggatatccggattgaaatgacctactacgacacgagacaacaagatgaggttctcattggacgccgacaagaagccgccgaccgggtccaaggcaaggtccctagtactccaggcagcacgggcttgtctggcccccgccaattgaaagatgtcaaacgacgacccttgcccagtggtccttcaggggcctcggcgagacaacctgtggaacaagctcactctccacttccacttcaacaaccggtcccatcgagacccgccatccctgagcattcaaacattgcatctagtgctccggaaagcacatatgccccgagatattcagagcctgcttacgatgcatcaacatatcacgccccttctcctgtgccgcctccctcccggggtgggtatgagagcgatagccacactcaaggatgggacactgcatctgttgctcctctccgccgaaaaatcacccatgaactgccttacgcttcaaatgaagttatggaaaatacatatgatccgcgtttgctacagcagcagcagcaggaacaggaacagcagcaatttcaactgcatcaacaacagctgcatcaacaacaacaacaacaacaactgcatcaacaacaactgcaacagcagcagcagcagcaacaacaacaacaacaacaacaacagcaacagcaactacggaatcgttccgaatatgatcggccaccttcgagagacaatcgcctcaccaggcaaagccagtacgaggcagatccctatgaggaagtttcatacctctcctctcaagactactctcaaatagagcaaccgcgatacaatccggaccctatgtcatatggcgcaacccatccacacgatgtgtcaggttcagagttcatgtcttcctttttagggtctgtggatgaaccgagataccatccaagatctcgccctctacaaatcacggctcatggtcatgattggcacccagagtatgctggaatgcaaccacgagtagaggatgaagatgataacggaccgccccctcctccaccggcacatcggtcacggaggcactctcaactgcccaccccgcaatcatcgccccactcgtatgcagcctacacaccccagtccacacctcgatcctcggctccccatctaccatcaagcatgcctaccccgtcccaccgcgatcactatcaggagccttctttaatggagaactctcccgcgatgcccgcaagcctcgttgcaggtcatgaagtggaagacccatctgagaaagcagcatttgagcgatcagtccgcagacgcagcacccaatgggacgatgagatgatgatctcccagtcgcctgtactagctcctgtatcagtccccgttcactacgatgctcctgtctacagtctgcgaacatcccccaaccctatcgagcaaaggcccacttctagcagaggtggatctgtcagctctgatatgcgggctgtgactcggaaatccgtcagtccgcggccctctacttcagacgtcggtggtggctcttcagtccctttctctcccgactcctacatctcgctaaacccgaatgcctctcacaatcccaaccgagatccttccccggcgtacaacacacctatgcaggctagagatgctgtgatacgtggaaagactgaaccccgtcgagacggagatcacccaattataggagatgatggtcgggagattgacccatccgaccatcttcccactgatacatgggcacccgaaccagaaaggaagaaccgcaagcctgaggtcatcatccgcttcaaaaactcgccccggccaacttctagaggcaatgacgctcccccaccacgcagcacaggccagccacgcgtagcattcaaaactgagaacaacacctatgcaccagatcgcccagtcaagttcacacccccccaggtgcacccaaatccagggtcaatggttcgagctccacctcggccggactacgcgcgtgaacgctctgacagctacgcgcgaagtcgggcctacagcgcgaccacttcggttggccggccgcgctcttctcgaggctctgtttctccaaacccagggtctcgtaagccactgtatgactacagcccaggtcccccaattccaagcaaagtgccaatcacaggaggagctccaagctatcccgtcatgtctggcaatacaaacggaaacgaccgcatggatgccctcagtctagagctgagtacgattgacattggctctgcagcttgcaaccctggccggggggctgttcgaaaatacgtcccaagacagccagcttcaatcggctacgctaggtaaaacgatttgctttttacatttatgcatgatttatgtactgctatttttctttggggtccttggtgtggttggtgtatctctcgggtccgtttcgattcttgttttcagactgcattgctctggcgttatggatctgatctacggggaaatggggcttgatcatgtacaccataacgggaataaccaagcttggaatgatatcgtaaagtgacatttaattcttactagatgagtgcttccgtagattagagagtatcttcaacaagatcattgatgtaatcagttgctcgatggtctgacagtagacctcagtgtgcctatataggtcttcttgatatcctgggttttccagtgattatattccctgctagctccagctgcctgtggttgtctgtttgcacatgcggtcgtatatggagacatcgtgctcaggtcatgccaacctgattacctttacaaccttctagaacatcatgatcatgtctctctatatataaataccgtcatactcaataaatcatcctagagactaggttgttccaattgctactagctacaaaccagcacacacgatgtaacgacagagctcttactgtagaagttggcagggtaagaacccaataaaggaaaaaaaagccatctgaactcgacccaagtcaaacgcagtaggtaagttcctgcaaagttataaagctcatcttattacagctcccctcttccccctctatcctattctcgcaccctgctttccttttcattttggctcaacaccaggacccttccacattatcagacagctttgctatcaaaaaccatctatcaaaaaccatcaggtagtgcgttcctcatcaagaacgtacttcccatcttccttcgtccttgtcttgtttggcatgtccacagccatgcaaggtcagggctctgacgtccatggccatcaaggccatctccctgaggagaacgtgaaaatgtacgtatagtaacatcccctcaatctactcggtatcatgagttgaaaaccctatccttcttgttgacgtgaacgtcttttgattttgtcttgggatcgttttgctaacctatagagctcagacctagcaacaatgtccacatcaaccaagatgctttgacgtgagtatacgctatatcccctggcgtcgttgtgtgcctagcagccaagcctatactatctggtatcaagcctttagcctcagtcttttgatagttctctgccttgctatcactttttcattatctacgaacagtgctacgtgatacaatcccatcttgggtgttggaagcatcgtgttctatgaagatttcagctaaacaaagtattagtcctgacagtcccaatcaaacaatccaccaggagaaccgagcgctgtcgctacttctctctcctccgcccagttcgcctttgatacctctgggcacaatcgattccgcacccacccaatacagcccagaatatccggctggtccccagttcaccagaatgaatggatcataccgtgtttataatccaattcggggagcggagctcaggactgcggccgatcttgccaacccattcagagacagactggatcaaggtggccagatgcgagaccatggaagggctcgcagtagaagcccttacagctcgattcaatccaacgggcttcttgaatcccaggatctaccagcagggccagcgaggggattcaatcactatcctcgggaggtgtatgttccgcctggcatcaatgacatgatgcatctgaatctgcctagctcttctccgacactgtttccggacaacacccatagtggtggtcgtgatcttgctttgagcctcccaggggactctctgggacagagttaccatctcaatgatggcaattggtatggatacccccaggagcaacagcaacaacaggtgcaagggcccgaaagaccaccagtcgccaagcaagaggaggaggacctcgacgacaactacgaggaccatttgtgcgaattcgctgcaccatgccgaatgcatccctcgcctgatggaatgcactaccgaaaggtagtatcgcatgtgttcggcagaaacaaggccgtcaccaagctgtttccactcggagtttgggtccactactgccggaagcactaccagcgcgcccggtatcgcgcagatcaatggcctttcacacagtgtgacctcctgcttgagtcactgacacgtatggaaagctgggatggagtggagagcttcgagctgatccttcgccggcgagagcaaatgcgtgtcgggcgtgaagctgagggcacaacgaccactgagacctccaagcagaaagaggtcacttcctccggcaaggcccaagatcagggcaccaagtcttcggctattgtcacccgcccgggccgtagacacccaactgccatcatcgcccctgtcccagactggcttcggcaacacgttggtcatggcaagacctttcaggaaatccgccagatcatcgaaatggtgcgcagccacatggtccggctgcgaaaccaagaacgagcgcaacagcagctcaacgacgttcccaagtccccaggcaaaccaggaagccttcgtcgaggtgcatcctcgagcatccgaaagggacgtaccgcgaagggccaaagcccccttcccctgcgtcctagcacggttcgattccccgacgttgaaatcctcccccatttcaagccctgggtgaaggaggctgctttgcggcagcgatctgccacaaacggcccaatgaacatgaacatgaacgagcccgagatcaaggacgagtcggagcagagaattctcggtggtggacgtgtccttggagaaatccaggataaccgggacaccaatggcgctggatccagccaggcatcaaacggcgactttgcagctacagcagcgcagcactgcgagggccgcctcgagtctgttactgctgtttctgctgacgacaccgctggggtcaatctcttgcaggtgcagcctcacatcggtagggctgggaccaaccgtggccagtctgagagccagcgccgccgcagcgagcgggtctatatcaaggccctagatcgtctccctggccagagcttgaacaagaagaccatcaaggaggatgaggaggaggaagcggagaatgaaatgtagtcttccattggaatcggcaatctgggttgtgactcatgcggatcgctcatatctgagctcatgtatccgagttctattgatgtcagataaagaaaaaggatcaggttattggcggatgatgctccgccggaatgttgcagaagtcgagttggttggagtgctgaagggactttaagtatgctgcttgatcgcgcgtttcgcgggaatatcgcgggcgaatttgattctcaaaataatgaagcggcggtgatagaaatttgatgtaagagaagttgaaatctgaaggaaatgtgagagaatatatttccgtgcacagcaaacaatcaaatttgatcccattgcgttgatatccgatcaatgactgcctggtcatgtagttgtcttcattaattctacgatggcaaactccatatacaatatagggctatgcctgacagctgaaggcaatttcaacgacattcggaaattcgagatctcaaatcccatttcagcttcatcagagactaccgatatacatatggatgtacccataaacagtgaaaatctaattgaacgaatatttgaatgcgaggaaaaaaaacgagtaagaagaagatccaggacacatactccgtacaatatagacaaccgcaacaatacgacacgcttgctaaagacaccgaaatgcaaggaacaaaaagtccctatgcaaccacccaagtaatatgaatcaaaaaagagattaatgtaaggtaattatcatggtagtttttgtatggaaaaaaatgccaaattcaggtctctaaacagactggtctagcttgccacagccagctgggcgacgagatcagacgccacatcgaggaaggggtaaggactggtcacctccttctccttgttcttgaggcgtctgctgatgggatgccattcggtttcgccatgagcgcggatcacgttctggtagccatcgcatttgaagtcgaccatgtagttgttctcttcgagttggtagagctgtatgtcgaggaagacccagacaccgtaggtgatcttctggagtccgcttggtacattgactgaggaggccgcactagcgctctcggggacggaggactggggttctctgcttcggtcttccgttggggcagagattcccgagatgttgaaacggcggcgcagttcctcgaggtcactgcggctactgtaagcactggtggtgtctccaggagggttgatgccttctttcagcaggcgtgcacggataaaccatgggtccttgggaatgtagtagtcggatgggaggtcggggtatttgctctgcaagggtttgggcttatcaggggagggggtcgcatcgggaccaatattggtgcctagagaatataagaatcggctcaaaatgagtaatgggtggaaacatacctgattccacgggttgaatatcccacaatccaccctgggcagcaattgcccggtacagatacagcatggcctcatatggctggtttcgggaccgaataccaaactgccatttacggctccgtttgggctgtttttctaggggttgaccggttggcggctcgaatcgcaacttgtccaagtcgacgacactgcgtgagtggggcttcaatgcacgggctgtggcagcctgttcttcgggagacatgtcccgataggcagatccctgtccctctgggtcaagcttgatggcctcttggcgacgctgctcgagcatttggttgcgagctcttttatctcgatcacgttgttccatgagttggtcgtgaacgtacggcaagctagtagggaggattcggacgtggctaacgcggagttcgtcctcgtctgattgctgtggatcttccgaggccctacggcgcgatgcactagcggtcctgtccatggtgggggcggccggggtcccttgatgacgaggcgcaggagtccgatccgcagatgaaggcgcagctcctttctgggcattttgagctaacaaattatcatccgagggtgctatcgtcgttagcagaggtaggttagtttagtagatcaagacttacaattagtttgcatcatctcattctcaacaacgatggagaacgcatccttgatcgcgctgggttcagcttgtctcaatgcctcttcgatatcttctcggccatatcccatgcttcgttcgagcttggaaactgcaattcgatggattttgctttgaaccgatataggctttgctatgtcaagccttgcagaatcaaccttcttcgggtccacccccggggcgatgaattcctctcgtggtggttctaggtacttggggagattcttcttaaaccatgggtcttctctgatctcagggattgtaatgcggtggacggggtgaacttggagcattgcccggatcaaacgagctgccccggatgaaacatatccaggtatgtggaaggtgcccgctgcaatcttcttgaaaagggctggaatatagtcatcatcgaaaggcaagcggcccaccaacaacacatacagaatgacaccacaactccacacatcgacctcaggaccagcatagagctttccggagatgacctctggcgcagcgtagttcgggctaccgcagctggtcttcaggaagttgccatccgtcataatattactcaaaccgaaatccgcaatcttaacgttcttctggttgtcgatgagcaggttctcaggcttcaagtcacggtgtacaatcttgtgtcggtggcagtattccacagcacagatgatttgctggaagaatttccgggcttcatcgtcgccgcatcttcccttcctcacgagataatcgaacaactctcgctctgcgtactccagcaccatcacaatatcggtcttggtcgcaatcaccgtatacctaaatcattggtcagccaactgaaatcccaatttcagtgtggattgaaattgtacaatttgatgatgtgtggatgtcgtagcaattgcaagtactggatttctcgctccacgcgcccaaccatatctctggagagtagtttgcgtcgggagatgatcttcagagcaacttgacgtccagttggctggtggatagcaagcttcaccttgccaaaggaaccctcgcccaagacccgtatagtctggtactggtcgaggcgttgcatatctcgggtagtcgacggtgactgcaatgggtcctcgatcttgctggtcggcctcgagggcgcgggcattgccatggcggaggggttggaggcgggaggtctcgcacgttcacgcggacgatcacggtcggaggggaggggaatagcgaggtcttcctcgtcgaatgcagcggccatggtcgggaataatgccaacgtgacgtgattgattttccagacggttcagcggtcgggactgctgactgtgcagaccgttcagtgcccgggagggttttctctctattttttctctccaaacatttgccaggcgccaatcagttgatcagtctcgaccctccccacaatagaaccgaatgtggagctgggcagctgtttgtcgggtgggggatggaggggtaaatttgcttgtcaggggttgaagaagtgaagaaaccaaaatggactgaagttttggatgaggttgagtgattaagccaatataaataggaagatcaatgagatctggggagccacctgggcatgattttcaatcaacctcgtttgtggacattgatggagttctagaccttacctaagctagttctggggcacatcatctattgtccactgtgatatctacatttacaggacatgttagcaaggaaccctgttatgacggaaaaatagtagtatatagtaagagactacttttcaattactactccgtatcatacttctgaatattcaccttgacctatgttatatatcagccaagctttgtcggtcaacacagcagctcctctttatatcttatgccagccctaatgcaatgcatatgatcctagctcgaaggttggtctgtgtctccgcagactaacaactaaatagaactagttaacaaatacaacataaagcttctttgtctttcttattttttttaaagagatttcgccgaagcgatccgagaaaatctgtgtcataggcagtgggtcaataatacccttaaagaactgtggctgaaagtcaattgatcgagattgttcattatttacacatttccagggtagaatagtgcatttcccctaagcacttggatcttaagttgactatatatgcgggttcgtggatatgtataacgtgccggctatattatccagtacgctaaaggtacaaatgcagccgggctatgcaacacagccactgaatcttaggcaattcagacaagagatataacctcatcgcatctaagagagtggagacaaataatgtacattatgtattgaatatccatctatccatctatccgtcgaaattatattataacgagacccagccttggaagagaaatggaattttcttcccgtaaaagagacttggatggtacctgggccttctagtaaattgtatggatgaggaagtaccccgggagtacgtgcattgagtcatattgcggcttagagcgatcaagcggggtgtcggggtcccaaattggattagcgtcgagtcggggacctcgaaagggaatggcggactgggagatcggagcatacatagaatcaaccgctaccttagctcttaggttccttcaccttccccggaagccatacagagttaccgttcctttcgtcttctttacgatatcctcgatatcttagtgtcctactgcctcaggatccttagacgtggcctgactaacacggcactctctctttgacttttcccttttcatacaaaatagatacccttggtgatacccactctacgttttcttttccaatggctttcgttgcggatcaattcttctctgagatggatgcgacaatctccaatgaatgggttgacttcgatcaattcctcgatctcccttcagcctacgatgaccagtcaaccgctactaccgtctcacctcaagacctagctctgccctatgaggcagatgggattttcacccccccatctgatttcatgcaatcctccttcgacatgaccaactgtggtttcccacaagaagagttcatgggaatggatggaggtttcatgcaggacccggctgttcctttgttcgatgatgcttcgttcttggcgtacaacccatacgacagcagcaacacattccggaacctggtggaggcacaggctgccgctgacccgcgtgttggttctatcaaggagaagcgccgcgaggcagggattgcactacacttgcagcgcctttgtgatgacactgctcttgacttggatatgtcctctgactctaacaccagcttctcatccccaagctggtcagaatacgttcgcgggagcatctctccgcgccctagcccggagaccacatcggtctccgaggcaccccctccaggaggcatggagatgattctcgacttgaacatgaacgccgcagccaatgtgcctaggaaacagaaacctcgctctcaggcacagaaggagaactacatcaaggctcggaagtacggtgcttgtgagaagcataaaaagcagcataagcgagtacgttttccattcacattaaccatttgatcaccctaacgttcgagtagtgcaactgcctggagaaggctgctgctcgtgccagcgatgttccgatgaatgccgcactccaaccacggccgaggcaaacgacgccccaagtcccgacctcagagtcacggtactcggactcgccgggtcaccactcattcaacccagctcaagcgcttcccaccattaaggcgatcaggaaaccaacaggctgcacatatggggtcgatccatctatgggactacctgtcgcagtacccaccaccaagcagaatatcaggacgaagactcaaaagagtacgccgcctggacacgatattgttctgctatctggcaagctcaattcaaattccaattgcacgttgaatcaagacaacgttctatcatcgagccgaaacgccgcgaagggtcattgtgccggacacgacatactcctatctggcaagaacatcccaaacaactcatgcgctggacacgagcgactcgtcacccaagagaagatctccaagagcacagcaagtggacagccccacaatacatgcagttcaaattcacctcggccggcccacgcagctggggtgtcatctggcagttccagcttgcgctggtgcgtttcgacctcgccggttggtgttgcatggtccgagaggactgtcaagacgtcctcggcgaaccattcaactgcttgcgacggtcgcactccaggcttggatgtacaacgaacaaggtccactcccacgatggcaagatccatggtgccaggtactgttgctggcagccttggaatgcgccattccactttgctacgcaactccggaacccagctacctggatcggatcacagggcctcagaaggacttgcctggcaaatctcaaaaatgtctggtctcctaccggtgccaaacgatctaccggtctcgccgtctcggcgtggatcatcaggtctttctggaactggacggccactcatcagcggagacagtcttcgtgttcgatccgctgctgaaaggactcgccgcctgcttaccagtactgccttggcattttctggtgcctggcaatcatcactgtctttggcatctggggttgaaggcgtggtttacaaagctttgtctctatttgcccgacatgttgtgtctgcgaagaagggcttatatctcggcggactgcggaacgctttcgtatagctgttctgctgttcttcgatgaacgtcactggaaggaacatcttccgataattggctggcgttgaacgatactgaattgtaaagggcatgggtgatatctattgtcacgttcgagttagctgtccctaatgatgaaatcaagcgaaattcatttgcattatttaatctccagcaaaccctgtatgttcgcagtaataatctaggagccccaggtacaattagttatatgtggtttcaaaagcaacaaccaaatatatcgcttccttcttagagctcccattgaatcggtaccaatatttatacgcaatcaaaagtagttcaaaatattgcatgtctgatgattatacggagcactatcgaggttattttcagaaatgatagacatcctttgccgtccccaccaattgagcctaatcccgcgccagtcctttttctcttgttcctgacggttcaaatcaacacgcatactttcgcttcgacttcaaaaccatgcactccccgcccctgttccgcttcactacagtgacggggtattttctccaggatgaccccgctacggaccccgacaccttcgactacgtaagagacccaaataattctgtcaaaaccattgtctgatgatctgaaaaggtgaactcaaacttcggcctcatcgaaaaacaatacgacgagcatctcggagtagaacagaccgacagccagtggcagcgtttcgacgcccacattaaacgacagaacgccagcaagagcaaaaagctcaaagttctcttcctcggacgccacggcgagggcgtccacaatgtcgccgagcgcaaatacggcagcaagaagtggaatgtaagtagccgagtatttcctccacgaatcaaccagacggcaaccagcactctaggaatactggtctctgcaagacggagacgaggacggcagctgggtcgatgctcgtctaaccgagcagggaagatgccaggcaaaagtcgcacacgcagcctgggagcagcagatcaagaccggcatcccgtcaccggaatcctactacgtgagccccctgaaccggtgtcttgaaaccgcgcagattacgtttcagggacttgcgatccctggcacggatccttttaagccgactatcaaagaggtgtgtctgtttgatccctactacggagcgtacaatctaacgagactagctactccgtgaaacgatgggtcagcacacttgtgaccgtcgctcgacggcttcggaaattgcagacgagtacccggagtatagatttgaagcggggttctctgaggaagataagttgtgggatcgtgaggtccgcgagtcggatgagcatcgcactgagcgactgcgtggtcttttgaacgatatctttgctcatgatgagagtacctatatttcgttgacggctcattcgggtgccatcaccagcattctggaggttttggggcatcgtcgctttgcattggcgactggtgcggtgattcctgtgcttgttctggtggaaaggggggtaccatcgcagctggagtcgcaagagctcgcatgatcggaggattgcaactttataactgacatgggtgctggggttgataaatattagagcagagcagaacagccagtctcaatggtttggtatccaagaaattgattcagtattgtacatgagtcgcttctactcaagaaagatgagagcgacttctcacaaatgcaattgtcgcctccaatcggctaatgaaaaaccactgtccacgcgaaagatctagatataaaaaatacaaacgccaaagcatcgatcaccaactgtagtactggttctgcgcagaaatcttgcgatctggcagttgtgtccaaagctgagctctgcgctcccgctgggccttggcctcacggtcttcccattcgcggatgcgagtcttctcttccttcaacaggaccgagagacttgtagtagggggacgcatgcggttgatctgaccacgggcgcggtgatccatctcatatccgtaaggaccacggttgacccaggcctcttggatgtagatatcagaggggttggcaatcttctgccgctcgccggtcttcagtatgacagtaatgggtttcgttggttcggagccagaagccccaaggcccataccggcacggacaatggcgacattctttgcgtgttccagatgttccaacacgtccttggcggcctttttgttgctgaagcgcatctggaggatggcttcgtcgatattctttccagcgatttggcgggcgagaggacccagcttcttcagcgaggtcttgatccagtgagatctggagagcgattcgcgctctgtgcgcttaatttgcacctttgtcggtacacggcctcgtttccggatctcgcggacagccatcttcctatcccatcgcagctgggcccgggggtcgggagccaatcccacttgcaggcgacttaagtcgcgatcctccaactttccggagataccttctttttgttcccccgttgccctggatggcatgggaccggatgctggtgcggcaaggtcggagccgaagatggaggttgctaaagtaccttcttccttcttaggggccgaaggtcggtgggtgactttgggtttttggttggatccgcccgtgaacaagttcttcaaggaagaaaacaaaccggtcggttttttgctttcgctatctttcacggcgtaacggatggctgtcgtggtcaatgttcggcgagggacgaaggagacggtccggacagctaaaggtggtaagtcagtaggggaggtcaaggatccgatatatcaacacaacatacctgtccggaccaattgccctgagcgatagaccattgtggctgttgggatgttgttgtcagaagttcacgtcgggaaaaaaggtgaaagttccctgcacttgtggtctgtgcgggacaccggagcctgaggcaccttaaattgatcgatcttctgagaatagcttcaagatatgcgacttgtgaccacaccagtcgatagaacaagaacaggcttatctacagctggagatgatgtcgtatatttgaggatcaaattcgaacctcattctcgcgacattactgtttcgtcttcccagccatctccacagtatccactaggcctcatctttccctcttccagttcttctctctctcttttcatcttccttcatccctcccttcacttttcaggccatcagcctgttgtttatatccctttcgaatatctgatattcttgagatttcagcttgccctctcggttcaaggactctcgttccctccaggcattcatttagattcttagccacccaccagaagcagctgcgcaagagtaaatctacgtcatttgccggaacaacaacgaaagacgatctggacacgaccggccgatgcaggaatggacgtgttgaggtacactaagaccgtcgtatgatctggatctccgctcgaaaagtacctgggatccattacgacaattcccagtatcccatcgcttctcccaaagctctatccaaatatggacatcagttcgcttctttcgccggactcgaatccaaagtctggaaattcgacgcccgtgcctggtcctacgtcgaacaacgcaccggccacctctgcagggccatccccccacaaagctatcgagagaacccggacaggctcgagacgcaagggcaagatctcttcgcctctcgcacagcacgtatatgttcctagtggagaatcttcgccaggactgagcggaggaaatgggacttctccgactgaagtacattcgagacaaccatccacgccgggaatggataccttagcggatctcgcctcgatgcagcaccaccagccacaacgtccaacaccgaccagcatgctccggagtactgaatcctatgagcatcagttatctccatctactattcacccccacgtcaactctatcaaccacaacacccccacctctcggatgtcgttcgagctcgccatgtcggatgggcgcgacgggcccgcgaagcggacctacgccgcgacttcgcttgatccagatgcgcaacgtttggcgaccgaactttttcatcaaatatcgctcaacccccacacgcatgacgcgcacgtgcaatttatcggcttgctgcatgcaggattcgttaaccacgtctaccctccgaataacccagatgtccacggtgacccgcgacgctatgatctactcaacgatttgaaaacagcacgcgaggaaatggacaagctgttcgcgatgggagaagatctttgggccgaatggattcaggatgagagtatgttagcccaagatgtcgacggtcgcattgctgttctagaactctgccagcgatccgtggtagaggagtttggcagcacaaaattgtggaatatctacggcgagtgggtactttatctctacaattccgctcatggcaaaaccagttcccagtggaccgaagaggatcgcatgattgggcgcgaggtgttcacatgggattcggtcgtggaggtgtggcagcgaggtgcagacgctaccaaatggagaatcaacaacagccacttggtctgggatcgccttttagatctttatgctcaggacatcgctcgcgaaccttctcaagagaagatcaaccatcttcatggactgtacagtcatcgtctgcaaactccccacgccacctgggaacagaccttccaaaagttttcaagcttcatttccgcttattgcaacagcaagtatgaggagattatgtgtgaaactgttgctcgcgcagcggaagcaaaggctctcttcaacgcacgggaggaattcgaactgcgcctggtcaaagcgcaagagtctggcgatcgtagtcttgaatgggctgtttactccgagtacattcactgggaattgacgcgcaaccgccggaaacgaggagaattcaacttcgaattggtgaacgccatttatcagcgcgctgttcttcacttccccaccgatgtttcgatttgggaagactatgtcatgtttttaatcggcgaatctattcatcgccacgcttctaccacgacaatctctaccctagaccgtgccacgcgtcattgtccatggtctggaaacctgtggtcccagtacctgctaagctcggaaagagaaaatcagtcgttcaacaagatttcgagtatcaaacacaaggcgaccagcactggactacttgatgctggtggtttggaggaagtcttgaaggtccacgtcacctggtgcagttaccttcgccgacgcgcctttttgtccgactcgaccgacgaagatcttgatgttgcagaagttggcattcgctcggcaatcgaaagcgtgcaagaactgggcgaaaagaagtacggcccggcgtaccagggcgatcctcttttccgtctggagcgaatctatatccgtttcctcagcgaaagcggcagttgggacagcgcgcgagagactttcaagggcttagttgctcgccgtggcaatagctatgaattctggctcgcctactacgaatgggaattgatttgctggagcaaatttgtgcaaggcgaggcaactgtcgacgcagcgcgtcgaacccccaacccgagctttgctactgctgtgctcaaacaagcgatcaaaagaacagatctagactggcctgacaagattgttcagacatatgttacacattgtgaggactatgaggactcagatgaactccagctagctgtgattgagactcggaaagcgatgcgagctgtcactgcccgaagagagagggaagcgctagaggcagccgcagcacagcagcagcagcagcaacaacagcaacagcagtgggaggccgcagtgcaggcagtcccttcacctgaaaagcgaaaacgcgaagatgagaaggacgggatgccgcaaactaaaaaggtccgcaaccaagaggcactggcggaggcccctgctcctcctccacgggatcgagagaatgcgactgttatcgtctcgaacttgcctaaaggtaccactgagaatagcgttcgtctatttttccgtcatgtaagtgccttatccaattactatcgggagaatttagctgaccaaacagatcggtaccatcaataccgtcaaaatgctccgtagagacgagaaaagctccgaggttgcgatcatcgagttcgagaccaaagaagacgctcttgctgccatcactcgtgaccaaaagcgcttcaacgacactgataacatcatcgacgttcaaattgggtcagagacgacactttggatcaccaattacccaccggatgcgggtgaggactacttccgcaatcttttcggcaaggtaagtgcttcaccctagcctttgtggcaaagctgacttgagcagtatggcgaagtacttgaaattcgaatgccgtctctcaagtttgacacttctagacgcttctgctacttgcagatggatacctcgagtgctgcccaccatgcgacagagcttcatggaatgcggttcgaaaatggtacgcggcttagtgtcaaaatatccgatcccggacaaagaacagcccgcagtggccccagatacgaaggacgagatatttatgttgcaaacattgcctgggatgctaatgaaaaagatctgaaagaactattttctaagttcggtgaaatcgaaagggtgttgcttgagcgaaagacgaatggtgccagtaaaggttttggctttgttactttctctaccaaggacgctgccaatgatgccgtcgcaatgaatgaacatgtgttcaagtcacgtcctcttcgtgttgaaattgctaccacggacagccggcgtggtaaccaactcgtcatctctcgagttgcatcacacccggcagatcacggtgcccgtggtcttgaagtgccagttggtgatcatgcacagcgcacacttgctctgatgaatgtccccgataccgtcaatcaagcccgcatccgtacccttgtcgaaccatatggccgtttaatcgcgatcaatttgcgcccagaacatcaaggtgctattgtggaatatgtcgatattcaggacgctggcaaagctgcgttggcgctcgaagggaaggagatcattgctggacgccctctccatatcggcacggttcgagagatgttgaatttgcaaccggaagtcaaaacagaccgagggcaatccgccaagcccgaacgtataatgaagaagacgaacctacaacttactgcgccgattagacgcccgcagcagcctggcgctcggaagggtggtggtcttgggatgaaacgacagatcgtaagttccggtcagaaacaatctgctgccactccggccagcgacaaaaaggacgcgacgcccgacggcgagagcaaaccaaaaaagagcaacgatgatttccgcgctatgctcgcacgaaagggtccggaatgaagtgcaagtgcaatgatagcgacaactatggcgcaatatttttttcggcattattcattcggctggcgtttgtctgttttccggtggtcatcttgctgcttcctttagatccgtatgtattcactcgggtcggtcttttccgtcatgatttcttctttgtttgtggcacatgccgtcgtgtatattatgactgtattgctcttagttctaatgatgatgtctgttccgaggggctgtctccgagacattgccccggtgacttgaaagaactggtgatctatatactgtagtatatcggtgattcttcgattctttaaacttgactgtatgaagaatccatgtctcatttaccatattttatacattatcgctgcagaatggaggtgtctgattggactatatgtcacgatcatgcaaaacacattgacgtcaaccggcttcacttggtcaacttcttgattctctgcggggaaatacaaaacaccttctgatccattctaatgggttgcacagagatttattgaaacaatataccccttttcatctatatacatctcctcgaatcgctaaactcctaaagtctcgcgtgatcctgattcttatcggaccgattagcccctctcatacggaataccatccctacctttacccgcatcgtctctatttcctgtgtcttgcttgggtttaggcctattgacacttgtcataatatcgctgctctacattcaatgtgcagagctatcaccaagcaccgtgaatattccacgtcatcgcatacctacagcaatggacttccacctagtacctcgcggtaccgatcggaactacacaggatttttcacaaagacaatagtctacatcgggacgctgatgatatttctagcctgtaggcaaactttagcgactagccagacactcaaacttactaacaaaatctcccagcatttggcttgacagtatcctcgatcgtcattccaaaatgggtcagctaccatagtgaaaaggtacgatgtttttgttcacccccgacaagctcctactaacaatatgaacctacagcccgatatcgaatactcctacggcctttcccgccgctgctcctcccttaccaatacctgcgagagcttcccacaacgcgacgactgccacggcgaagacaggtacttctgctctatgtggcgctcggtcgggttcttgatgtcctttgctgtcgttctgcagagcattagcttggtcacatacctggttatcctgtctggcgggaaacagctgcgcgagaatgggtggagttttcttagtttgatggttgctttgtctgctattgtgcaggcagccggaatgtcgatcgtggtgggttgataatatgtctatatctgggcccaagatgacttgtcctaatggtttggtttacaggcatatctattcgataacgaggaccggttcttcatcggctggaaacttgaccagtcctggatcctttgcactgttagctggtgcttaagtgttctctgcgcaggcgcggttattgtgtctggtaaggtcttgccctcagagggcggatacgagttgattcctgatcacgatgagcttcgagtcacttgatagtgcccaatgtagcattcatggctcctggatgaatcacgcgttacgcaacagacgaaggatacctatctaggtatcattcgtctttgacgacttcttataattctgctatttcggtggttgcagattgacgttttctatcttttgatttcgtgcttcggcgttggggctgtatacgtcttttatgcttttgaaatataacaacacaactaatatggataatgatttgaataatatatctctctatggcaagataggtttatcatttcatatctttgaagacatgtagaaaaatgcaatgcgacgtagaagcttcatcattcatctcatacagtacatttcctcattctcaatctaccagacaatttctttcccattcagcccctcaatagccggaatcagtggccgcagcgcttgaccatagtcacccccgttcggcgtgcgaagcagagtgtgaatgtggaatttcttcggctcctcattattcaaaaacacaccagagtgatgatcaaactcaacgaggatcaccggattctgaatacggtaatagaatggatcctcatcaccataccccccaatccaacaaaagtacgtctccgcttcatgcgcgcgcacctgattaatcttcatagcccgcgatttagccggcaggtaaagcagatattgctccagaatgccgtacacgagctgcttctgcgcagtactaaaactcgacacgagaataccctcatacggcacctcccggttgtcacggtacgcaccgcacagatggcgctggtcatccttattccagcgaccgggcggcatggctggatctttcatgtgggcaaagacacgagcggaagcctgcagctccgccgagagcgactgcatcagctgcaacccgagcttctcctcgatctgcaagatgcgcgtgccggcgtaagggccagcgtcgatctcgtttggctctgcgcctgtgaaccacggcgacgcgacgatctgccctttatacaagaagacgttcaggcagagatgatggccgtagaatgaccagccccaggggcgtgtgattgatgggcggccgaacaggacgaagttgtaggagaattcgttcatcactgctggcgacttgactagctcgccgaggaagtggttgatgcgcattgcgctgacggctttttcgtagccttctggtgagagcgttgtcttcaggacgttcatcactgcgtcccgggtctcgggggtgacttcgtcgagccgaatgcccttgtccgcgagtaggaactccgggttcgaccatgtgcgccattgcggcgagtcgatgtggtagttgatggcttctttttgcttatcatctagcaggctggttacggcttctgctgcgtctacaatttgttgaattgggacgtcttcttcttgtaatgtgaagagacccgggcggacgtttcctgtagatgttagaagcgttctggtatcgtttcagtttagctcataccatcggtggtcacgcctttgaagggctcttggaatagctctagccaatgcatatacagtgcatgtagccaaggtggctgatgtccggtcttaaattcgttcgcgtattcgtgcgcatcttgctggcacatcgcctggaagcgcgggatattgaggtcaggcaagtactggcggtactcgcctgtggtatttttcgatgcattggccatagttaagaatgctataaaaaaataaatcaagagagatgaagagatatcaaggtgttatagcaacccgagaccccacatcaggatgaccggtcttccccacgctcgtggggatgggaaattccttatccgctctggcaagatggggcttctggtctgaccaccggaaagatattatgtatttggagaaatgctatagacacactcttatggtatgcctatagtgttcttagcacgaccgcaccattaagtacccttccatacctatgaaaagaacatccgaaaagacatataaaagcccaagtctagagaaactgcgaaggaacaaaagatagacttcattcgcacagaagaaacgatatatcagatattatacatgaattaccaggctacttatagcctatgagctgtttactgggcaaccaaaaaggtatggacatcccgcaactcactgagcctctcttcttgtgaggactcggatattccgagtgattctccgcatgaagtcttccctcatattttgaaaatcccataactcttgtgcgtcttcctgagagcttcgaaacacgtattcccccggaccttgacaattgcctgatttaatcccggacttttccccggtcacgtgcagtgaggccggtccgggatttccggcctcacccaattgtcgtcgaagaatataagcgcaacgctcaacgtcgttattatcgtctgaagcctattggggaatgtctcgatgatgcagaatcctcggtctccgatccaacagcctgaagtcgagcagccggccgctaagcgcatcaagcggccgcgtgcgactcaagcttgcgacagatgcaggttgaagaagtataagtgcaatgagcgatatccgtgtttgcattgtaaaagtgagtgaccaggttataattagtggcggcatttctctgacaattacagaaagcggctgggattgtgtgtatcagggaacttatcgagagcgtgaaagtagccggtctgcaaagtaggtcgatcactccgcatatccagtatgtttgctaacactcatagttatgtcgccgaactggagaagaagctggaagagctgacctcgaagcttcgtgatacggaagccaaagcttcctctaaaggtcctattccaccagcagctgaaacgttatgctctatgcgcaattcttccacgccacgggatgttccggcaatatccgaggctcgtgaaggacctagagaaatttcagacaagcagactcaagagttcaatcacatcaacaccattgaatgtcacagtagtacgtccccggctgcagtcattggccatctgaagaaagagcttgagccaaaataccaagaagagcatttttctcacgcagctgattattcgatcatctcaacactccgtaatccaaacttgtctcctttatacgccactgggccggggcagatgctgtcaattgaacagtcaaactactatttcgaccaagctcatatctttatgaatggatattttgagagcattcacttcatccatccgtttgttgataaggaggactttttcgcgcgtgctaatgatctttggtttaatcgatcacgcaagcctgagccgagttttgtcgctctatacctcagtgttctatcgcttggggctttggtgcgtgtatgggatgaaggtaccttggccggcttgggtcggtttgaatggagccggaagctgtttggggaggcgcagggatacctgaacaacctgcggttttcgaatgatctcgaaactgctcagtgtctttacatgatggtgcgtgggtgtttctctatgcgtgatcgcaagctaacttgagcaggccaaagtttgtcaaaatgaactcaatccaaattgtaagtgttcattctactttttgatttcaagatctaacagaacagtggcctacatgtatcttggtctcgcagtacggacgtgtctatctgccggctttaatcgagagattccgtgtctaggagataccaccgaacgttctggatggatctcaaagacttggtggtaagtggaaagtttgtctctcgatataaattataactctaacgaggtgataggggtctgttctctttggaaatgtaagcatatcgtgcattatcgttgttaatacttactgataaattagtgagatgagcttttcggttggacggccagacacccttggaatggacgaatatcacaaccgcagcattccaccacgcgatgattctgaatttgccatcatcccatggatgattgattttgcgcagatcattcgacaagtatctgttcaaatctatcattctcgcatctcattacaggacaagttacaacttgctctacagatcgaaatggaaatggatcgttggctagcgaggcttccagaaatgatcaaacccgacattggtggatatagaccgtctcgtagtgccctgcgcgacccgaaatgggcacgaagacaacggcttgtattgggaattagtaagttatccatgggacttgttaactaactcccgactaacgaatttagggtattataatgtcaaaatgttgctcttccggcctttcttaagccactttccgcgcaaactccgacattctccaagcgaattggaccaaacttttgacaaatgtttggacgccgctatgaagactctccaggtgctacatgacctttaccgagttcacacgtttttccgttgctggtatgttcctttgccgagtatcgttcctttgctaactctttaggtggtataacacaacctatataatgcttgctacgtcaacactcctccttccaatgtctaggctcggcatgtgcgctgaaactattcctttgttgcaatctgtggaaatgggcgtggagatcttggaagccatggatgaatgtgcaacatcacaaaagtcggtagagattatcaggcagtacctcagggatttccgagcatccggagcttcacagccaccaggagacgacgaagcccaatctgaggcgggacaggtatttgacgtgccagtatgtattatcgtcctgttttcctaggatttgctgaccatataggaatgggcttatggtttcggtctgccagattattctttcgagggaattgctcagctatttgacgatatgggagacatcccgctggaataatgatctcatatacccgaaaacttctattctgtatatatttgcaccagtgccacctggggttttgaaatctatttgatatcctacgatcttacggactatgacgtcttcacaccggttggtttttggcaaccacagactcaacttcttttatcacaagggcagcagcgagccatcggaactaatgtgatgtcggcaattgttcattgttcattgcgacttggaatgggtttcaatcgacatgctcaccatgtgctccgaggccccggaaaaaccgagcaatcagccctctactcggaaaagccgaccgaccttccattgaagcaaatgaattccctgaatctctggatctcactgaatctccaatctctcattctcggagcctgctctcagattcgaactcctaaaactcctatcaccatcagaaggcggtgtgcgctaacggattatctatcccgccgatgtcgtctttacatccatccctagactagatggatatctcaccactatcatagaaggtcatcatgaacatcgccgatgatccactgcgtcctcgagaattagcctcattcaagtttcagccctctctcagtcgacatggcacgcgttactctcttctgcttgttcttcgactcacttgccataccgctgctgtagcatcaaatcgctgttgaatcagacgcctttaattccggaatcttctcaagttatcgagattgttgagaagaactcgattgttcttgaagggtatgcgacttggacaatctcgcctaatagagtattgaatcatgactgcgacttacctacgactaaaaaaacgtcgcctcgcaaagttcatattggagagtcttgcccgggagtttgcagcttatcaaatgactattttgatgactggccagggcttcaaccgctaacaaattccgccggtaattacctcgctgtcttcgtgcttggctggtcatatatactttctgcaagattgatagaactccgtcgaagaacaaatgaagacaaggtcgtctataccgacgagatggcaccatggaaatcaggccacgattcaaatgctagcgactactttgagttagatattgggggcgatagtgtcgctgaaatgagatggtgggctgcaattctcgcaggtggacgtggctggcaggctactcttcttcgagggactgaagcctagttcccgccatgggaataccatttgaatggcaatgatttcaggatatgtcatgatacagagttgccatattttcttgaacccccgtcttcggcagttgcacgagagtatctttacaactttgccagatgtcacgatgctttcgaccaacttatctgtgcactggctgctaccctgatgttgccaatgtatggtcggtttggtgctgccattgttttgcctaggcctatgcggaggcaagactcgcgccagcaaacggaaacactctttgccgatcaaatccctacattcgatgacatttctcggtatatggcattttcgggtacgtcaggtctacttgcctcgtgtctatttgaaggactctgggagccgggtattccttgcaatttggctagtcaatggctcgatcctgccatgaaggaaattactccggcccttttccaaaggaaacagccccttcctgttatttgggccctgtctgaaagacgccctaatctagcttcgttgtggttaggtgccacaattacaggccttttgccccaaataattctagtatctatgtgtttcatgccatcaatttacctcgaaggagtggcatggacgcaatctcctcaatcctttatggattctcctaaccatcgtcttgttaaaccctatagaaacggtcagagggtcacgatagctagagaggatgagttccgtctcttgtttttgacggacacgctatcggaaaaatatacagtcccaccactttgcccttattcaccattcggcgaggttgatatccagaacacctcccttgaagtcagacttcatcttgcttgcaaccacaggctagtatatcgttcttgggaatggcaatgtcaaaaaagggagacgttaagcgattttggaaccccaaccgattcgcaatcgctcaaaaagaatctcaagcatatttcacttctgtcaatctggattgtcacaggaattgcttgcggaagcatgttcaacaaaactctttggacatctagtttcactcatacggtaagtagaaggttgtctcacctatcgtttactacatgtcctagctaacatgggaattatagcaacgtagcagttttacctttctaggtagccttgcaacatcatgtattctaccaagatctttcaagcttgttgcatacaaacatattttgaattttcgcgcttgggcggccagggccatatcgatctttatctcgaagatacgtccacatgcgatacagcagaaggaagaaaagagtttgaatgatcggctttctaggattgctacacggaacttgttctcatggacgctgttcatcgatggaattcgaagtgaagaaaaaccactatggaaacatgactgattggaagatttgattgaaagggatcttagtgttgaatcgagtgaatgcgaagcaaaacaccagaacactgagtatattgaaaagtggctagaagatgccggtatacggagccaacctgtttatcatagccagattcgtcaacatacagatggcgcgaccgaaattcggacggttgtggtagcaattccataaacgctggttttgctctctcgccctctgacgagccgccttctttgtccaaatgctagagatcaatgctcgtgagtggatccaagttttcgtggggtcgagagtccactactcatgtttgatcggaattggtctaactgtgtatgggggtcttttcccgatggtccgttattggcattgaaaaagcgatgggactggaaaaccggatcacagccgacgacacgaatgccgcatctgtcctccgagatagaccttgttaaatcgctcactgtgtgcttgttagtcaatccaaacccacaaaggtggcccatcatctaccccaggttgccggcgaaaacttctgtgtaagactagtctattttaggaaggtttccctcaagagaaagtttcctatttaggacatcttctttactggaaaggtttctttgctggtttccctgccagggaagtttctatattaggaaagtttctataccaggaaagaaggaccatactgtaacgaagacatcctcggcaatcaaggcattccagaataatcatactgcagaactttgtagatgggacattgataaagatgggggacgactgttcgatatgcaaattaattcactccgacgatccgaagaatcacgacaatgaatacagtgttgaactcacgcttactcgctgttgggagcgaggatactatgctcttatccctggtggtcgctgcattgctctacttcttgttacaaagccttattggcatcccagaatatgaacaggcccgtcttcgagaattgtacagcgttccgcaacaacatctatttccagcaggggtgccttgcaatttgcaaagacggagcagaaacatttgtgatactctcatgtctccggcggtaagttactatgcgttttcttttgggcaagggcaacccttcatgagatgaaagctgtgactaacaagacacccagaatgtaagggctgttgtcttctgggcatcccaaagcggcactgcggaggctctggcatctcgctatgcctctgaactttcgacggcttttcccttgggggcgatgactgccaacctggcagactacgatcataaacatatgccagacgtaccgtctcaagcactcttggtgttcatcttgtcgacattcggtgacggtgaccctcctgataacggcaccgcgcttctcgagtcccttcaccagcttcgcaagcaaagtgccaacttgaacaatgttcgatatctcattttcggcttggggaattccaactatacccactttaacaaatatgcgctcgatatcgacggtatgctgaagggtatgggtgctacgaggctaggccgagttggtctgggtaacgatcgtgaaggcgccaccgaggaggattttgtggcctggaagaatgagagcatccagcaagtggccagaacattgcatctgcggcccgtggaacgagaatattcccctcgcatacaaattcgcccttggcgaggtggcaactgtgacacaaggcacggagtctcgccaaccgtttattatggcgagccacagtatgctcctcccactgctgataggagtaccaccgttgttcttcctgttatacaggcaaagcagctcatgctctccaaagaggccattggcgagtctgagagttcacgggaatgcgttcatctggaattcagccttgaagaccacccctccatcacctacgagacaggagactacctctgtatttggccggttaatccggaacaggaagtctcggcgctgctgaaagttttgggcgtttggaacacgcgcaagaatgttatcgatatcgtaccggcggacgatacctcgagctcgaacattcgaatcccaacccctacgaccatggagagtctgttccgttacttccttgacatatgcggacctgtgtctagggaactcgtccgtggtattgctgaattaacctcggatggtgatttcaaacgtcgactcgaggcactcacaagggatcgcgatgccttttacgaagaggttacgttgaagaagttgactctcgctgcagtcttacaagcggccacgacggtacgagatgaaaatggatcggcaatcaacgtagctgtgtcgtacgtcctagagaatctaaaaaagctacagcctcgcagctattccatctcgtcgtccgccgctgtggacccccgtattgcggccatcacagcactcgcagtcagtggccctcctcgtcctcctcgcgagacatcgtcgtgtccttctcatcgcttccgtgggttagccagcaattatttgttgcagcttcaaaaagaatacaaccgcagctattcaaggtcgcagcagccaacaaactactactactcaactgcagggccccgtggtctattggagggagggaaggttttcgcctatatccgccgaagtaacttcaaactgccaccagacccatcaactccgatcatcatgatcggctccggaactggcgtttcgcctttccgtgcttttgttcaggagcgcatgaaactcaagaatcaaggatgcgaagttgggaaaacagtactgctggtcggtcaccgagctccagaccaagactactactatcaggatctgtggcaagaggcgagcaaggctctagggaagaggtttgaagtgtacacggctttttcacgagtcgatacacaaccgcgccaatacgttcaagatttgttggcgaccaagtccgacctggttctcgacatattggctgctaatcaaccaaaaggtggagttatgtacatttgtgggtcgtcgctcatggcaaatggagtgaagaagtctcttgtggaaatctgctctcaaggccatctgcagtcggttgctgaaactgccgaaaagtgggttggagaacttagtcgcctcaggcgtttgcaagaggattcttggggatagggtccggtgatggatggtttagatcccatgtgcgtctcagattctgttccagagcatgatttgcccaggcattttcttgcttgcaaagtctcagaagctccagcagctccattctctccgcagggtcatgaatccatctgtggcctgtacaagttagctaggattgaatgaatataggagtagatttccgaaccgagggtgatagcaaggcacgcaatgacctttccaattggacatgtgttaaatcgagctgctccacaaagaacacggacgtggtcttggacctcactctgcaataattttggtcagaatgctactttgaatcgatgatgtgaaacagctttccagtagccacatagtcatacctccatctctttatgatgatcaatggcctgtggaccaagtgtcaagcgactcggattgtacatggcaaggaggagttgtgaaagcctgaaatgtacataacccgtcactagataaaagtaagcccatacatcaaacgagcaacagacccacttccacacttacaacaggcgttcaaagcgaatcttatttcaggcaatattctgccagtcttcaaatcagaatctgcgaagaatacgggttgaaacgctggccaagatagctctgaccattgtgtcaacattcgttgcagatcctcgaagtgttgcttgcgagactgtgcttcgtcatttccaaaacaaaagtcggcggtctctcctgctagcttctgcgatcgctttgtccacgtatagatgtcgtccgagtctccaggctcccagagatgggtcacatcaaggctggtacgagttggcttctgctgagaaatagagtggaaaacatcctgcctctggtgaacccagaatgctgacttggccaatttggtcactggttgttgcttatcacttgctatagtggcagcgaagacgtggccagccaagagatgtgactcagcgtcctgtccatcttgtcgggctatcaataaggaataagtaaaaatcgcgtttgatacgggccggaagcagattaggtcgattcggacggctacctttggactcttcatacaagcgtagaattacgactgatgcaagcccggccccatcggaaagtcggaccgggtcatgcattagcgctaaaaggatgtcaatggcctttcggtggaacaagtcggctcttccatcgttctggccggttgctttgcagtggtagaaagatgacactgctaagatagagtaacatagaacaggacagctgggggcaatccgaagaacttcaagtgtgaaatccgagtccgtgtgatcaaacctgcatcaatcattgccgctatggtcaacccaacgtaagcgctcgacatgggattatctgatagcaacccaccatggacgtcctatagattctccgaaatattgcatgagatacgcatcctcagaggtaagcagtagtggtgaggatgttgacagctcgtttccaatacgctgttctccggcctgcgggctcgtcccagggctgatgctgtggaacctatcttgatggattacgttatccgcggggagagactcgacgggagtctggggttgtgaggaccattggggcgtctccgatcggtccgaccgggttaactgctgagaaggttctaaagggggacgggcatcttggtctagccttgggctaggcagggtgcgggactgggagtcagggggcgacaaaggtgtgactggagggacccagtttctacgagttgagaaacgcacgttgaagcgccgagtacagggacgaccggctgtacggcatcgccgacacgaaggggttgcccggtcgcctgagcaatgtgcaagtccgaattagaaagtgccatccagtcgaggaactggtcagttgtgactaacaagaaatatgtcgtatgcggcaggcttgacagacagagctctgatccttaggtgaaaccatgctctcagacaagtaagcagggactgattggatcgaatagcatcaacgatgggaagctaaaggcccgggggaggggaggggcaaggcgacggagacacttaaaacttccccaactcagtaggtggaagactccagtatggattagcgagatatagtgccgatctcagaatgggagattggggatactactccgtagtagtatgtggaaaagattccacgggtagctccacggcctccacctttccttagctcagaagggaaagttgcctatttagtactagtacttggcgatgtccgagcctctgcatcactttgggatagaaaagttgccttttcgagcgggattgtcaccagctgccgattccacgatgatacgaactcccaaagaacagaagtcagatgatgattgatttgctgcatatatagcctcactaccacccgtcgtcatctggaaaacaaatatacctcgcccaccacactgaaaccgactggcatcatgttgtacatcacgttcgtcgcagtaactgttgtcttatgtcctgtggcgtatttcggcttctgcttcatcgtatacttatacgatgcaaaagcccttcgtcgattccaaaacttatcgttcctttctggcctgagtgatatacaatgggtatgggagtcgattcgcggtcggcgatataagactcttcatatggctcatcaaaatgcgacaattgttcgtgttgctccgaacgttctttcctttaatcacccaaaagctgctaccgccatttacggacacggcaccccaaccaccaaatcgcctttctacgacgctggtcatggtcatttcaagaatgtagccgacacgcgagacaaagaagaacattcccggaagcgacgacttcttgccaccggttatgctcttaccacactccttcggtgggaagacaaagtcgcgagccgtatcaatgctctcttgaaccagtacgataagttctgtctccggctagatgtcgcgagaagggcagatgctattccagtggatcatcgacggtggatggacattttcaccattgatgcgatacacgatattggcctcagtgcgaacctccgcctaatagagaaaggcgatgatttaatcgaggtccaaaactcgcgcggccagtcctaccagtgtcaattccgcaagtcgctgtgggggtgagttgctcgtccctttaagtttcttttcccctagggcgacccatttactaacatgtgtgctaggaacttgcggattcatgcctcatttgcctgggctccgcggtggtacggcttgcttaaaagactcacatggtgggattcgcgatggcaagacaacgtggccttcaatgatatcgtcgccactgcatgcaagcaccggatacagcgccatttagcaggagagaaactagatgactttttctcctttcttcttggagacaagaatggcgtaccgaacatgctgatgctaggggaaatgacagcggagtgttctgttatgctgaatgctgggagtgagaccaccggcatagctcttagcaacctcctttacttactcattgtcaacccaaatgctctcgagcgactgcggcgagaagtagacgaggcactggacggaatcgaagatacgaaagtcgcgcccttcgccagaattcgttacctgccgtatctgaaagcgtgcattgacgaggggttacgacttctgccacccagcgccaccacaactccacgatacacgccaccgtcgggtcaggacatcatgggctactggattccgggtaatactgaggtgctttgtcctacctacagcctccaaagaaatccagagatattttcgaatcccgatgtctttgaaccagagcggtggttgagtgacaacgctaaagatctgcacacatcgtttctccccttcagtgcagggccaagggcttgcattggcagaaacatcacgtacatggagcaacaaatgttgattgcatctctggtgcatcgctatacgtttgagttgattgctcctgatttcaagccagcgtatgaagaggccgttacgtgctcgccgggtcctataccgatctatctttttagacgagatgaaacttagaaactcttacgtagatggcgaatcaatacattgaatccaaattgttctggcatctcatgattttcatcgtatagcgtgatctttggggtgttgatattatgagtttggatatatagagccttttgtgacaaccacctttttgttagaaattctaaatactacctatattgatttaaataatatgcccagacagaatgtcaagataccgaaaaattcccagaaaagtagttgttcctcgtatataaaatggtaacatccagtgctttcaccactaaacgacaaaaaggcatcaaccaaatacaatccgaaaataaaaacgaagtcaaaaacaagacaatcaaagaccccaaaggtgaagccataactcggtagccgtccacaccgcgcatctctcatgaaaccaactaagccccctccaatatctataaaccgcagtctgattctctcacgaagagagtaattccatagttcacccaagcaatgagcagactgtgaaattgtcaagccaaaagaatatccagacccgccctcgacgtatcctctttccaatatcctcgcatataacaggatcacggattcggattctgcggcttattcatctcgctatccatgcgtccacagctcgtattaccacgaccatcaccgtatttcgcatacgcccgagcgaccctcggatcgacataagaattcgaagtagacgagctgcgactcagtgagcccggggatgacggggctggggatcccgaggatcccggtgtttctgcagatgcagccgccgttgctcgggctgcggcaactgcggctgcagctgcgggatggcagagcgggcagggggagacgttcaagccacaaccgttgcagctgcggcagattgtttctctgggaattgtgttagggttgggatggagatgtaaagggtgttttgtatatacctcggggcattccctgcacaacctttgcatgtgactaccttccgtcctccaacacatgatctgtgatccggatcgaggttgtacatgaagtgggtggaagtggccattgtaatggatgtagagatagaagggaatattggaaggtaaagagtgtagatgcggatagtgaagtatagtcaagatccacctgatataaattgcagatggctttgtggtattcttcccgttggtgctttctttctctctcaatggaaagcctgtcaataaagaatagccagtaattgtgagccctgaaagtgttgttgggaaaggaagacagtagttataggctaagtccaaagccagaaatgaccgagaaacaacggatatcttatacaagaagaaattaatcagtgccaccaacgaacttcccgagagtttccaagtgtcacatattcgatatgcacgacggagcgtggaatcgatgacaggaatcaggattgagtccaccagaatgatcagcaggccaaagcgagagacggtgataggacaattcgccaggtacatgatgtacgtggatattccatttacacgcatggggccattccactcaaatcctccagttattcttgaataaaaagcaaaaaaatatgatccaacatgagaggggaacgacacagaaaccgttctggacttagttgagttgtcaaacccccctgcctacgtgcttctgtcgagctaaggtagccagctgcggaaatacagggttcatgaaacaggacctggtgggggattggcgtttctcagtccacacgaccgggcctacgtcgttcatacgttttgcaaagggttcattcgatggtcattctgtgggagggtttttagcagaaaacatgtagtgaaaccaagatatcgccaaattggcaactcaacccttgatctatcgtcgggcagaccgtcgttcatgcgcggaaaagatgtcctggctcctaggagcatgactgccacctcgtgatacaaatcttgaccgctcaaactatataattatcctcccgagttggaaggttgatatggccacgagtatgggatgtgaaatgccaaccacggatagttgcattgggccatgcgatctttgggatgatgtatagatgataggggccatggatagattgtcgatgatttcttcccgtggaccttttggtcagctctcgtattccccttgtgggatgagctttctatcccaacaaatcaagtaaagtacggaataccatgcatggaagttggatcagacggtcagcagcccatataccggattcggaataggattcaaggacttctatggagtacgttcttaagacgtagctgtcgtaagcagcaaaagggaaaaggcacggtgacaatctcgtgcaaggatcaacccgatgcaatgatcttcataatccatatcccattgagaagccatggttgtaagcacaatctccgataactgtagggccgacacaaacaaatccggaaaaaggaaaaaaaaaagaaaaataactgaagctgtaaaatgaggtgaaaagagagtcctgtgagaggtgtgagccaccaataaggaacaagaagaagaactcgaaattggagtcacagccaatcgaagttcacagacagccctaagccggaagcgtggatgtgacacttagcctcaagcaggtaaccgtagaggggctgcaaggacaggggcaccgaaaaagcccagaaaccccctttaacatttccagtcaacattgcaaggattccttgcagccgtttgacttcacgtcgtcattctgaacggacctaaagcgcttctgcagattggtcacatgcagagtgagtcctgtggaaatgacacacatccatgaaaacctcgaatccactcatctcggagttttgtatgcagtctgccaccggctaaaagctcaatgtaacctaaaaatgagctcagatagaaccaacgggtatgcgcgtcattaggcgagccgcgagataccaaaaatttcagcctctgggtgatcgtactgtatggaagagagccggaaaaaagcccagcttcaaacctccatgggcttgttcaaccggttcgctgttggggaggacacctgcagccagccacttccaatcacacgctagcccaggattcgaagtccaaatttgaagtcgggctggagtcaaggtgcatgggcggcaagttgcatcaacggagaagtttccatcgatgtctcaaaggagctatctgagacttccggaggttggttgtcctggaaccagaatggttacaaatcagctttcggcaattagtgtcacgattaaagcccgaggatgccgggggcgaggaaagaaaataaaaagaaattatgaaagtcgcacgtaaagggaaaaagagcgacttggttgaagtcagctaatatgaacctgtaggatacctgcagcccagttcgcattgttgctgcaagaggtgagtctcggtcaccttttcttccatggcgtacggaaatcatgccaggcaaatgctgaccttcgaaagtgaaatgatatcacggtgcatttccaaatgaggccacccaagactacccgaaactggtacctggcaggcactgaaatgctatagcctaaagaccaggtggctcataggtttacagattacacgatgcgcagtcatgaaataaaggattgtcattctccattacgatctgcatagctatcacatgggaaagaataaggtgctacgtggcattccatcttaaagagtcgtgtgtgtagccacggtaaaaggggaaaataaagaaatagggcagaaacaaattatccagccaatgaacgccttcgtggctgccacggccacaacgcagtgatcgggtgaggatcttgcgtgcttgctcatggagccacggcataaaaacagcaaagggggagaggggggaaacaaataagcaccatgatccatccttccacgtaaagccaggacgcctgggtaattccgaaaacatcaaatcgttggaatcacgccgaaactcatgtgtcggcgttaaatcataagatatcaaagggcagagagcagagagcaaaagaaaccgaaataagggatgccgatcactggaagtattcattgggcaaggatgctagcacagcaatagttcccaggccacccagcagagcgctgatgacagccgtggtggcgtggcttgccaaggactttgaggttgagtggttagacttgattcgctttgccggacgctcattctcagcaaatgcagagacattctcagcaagtgcggagctgatcgcatccttggcttcagaggaaattgtgttgaggtcgagatccgactggctggttggctctacaggcaatcgctgagcatcttgagaaatactggcttcaagagccgatgattccatctctgttgcagtacgcttcaaatgtggttttctaaatgttgccaggcaggcatcttccgcgggatagccggtcgagaatggtccatcgtgatagggatgtttgaattcatgggacaaggacggtaccccaacaaagctctcgatcttccgttgcattggtgggtatttgttctgacatgaacttggcagctcaccggaaacagtgtgtgtcgggaaccgagcacctgggtttgtcataccaggagcagcttgtcccatcaatggtttgctctcgatacgtgcggggttcagtgactggccctcaaacggctttgcagatacatgctcgggcacttcgacagcatcagtgttgttggcacgttcaagtttcttcacaagctccggaccaagcaaggaacggatatcaggattttgtggaatatggtgttcaaggcacccattgtcagagcaatcagagtcgttttcggattcatcacagatctcgccatcttcttcaaagtcctcggcataatcttcctcaaagtcttcttcctcgaggtcgtccgacatttcacagccgtctccgtgaatcgagtcgctgtcgtacatgagacatggatatctggggtagctctccgaggaatcactaagagcatccgacttagttgtgtattcctcgtattcttgagcttcttcgtctgaatcaaccgactggtcatcagagagccagttttcatcgaaattcggatcccagtaaggagccacatcgcaccatcgatctccgatcattcggggctcccaggccctcacgatccagcacttgtgacagtcttcaacctcggtctcagtctccagctcgcgcttcaggtcttcgctgagaagctccagtggcttttcaacgatccaccaccgattgctcacccgctcgccgccttcatcttcgttgatgacccaatatcttcgcttatcgactgaccagtaccgaagaaggttgccgggcatacgatggaacgatgtgtctgagtcctcggagtcaggctcccagtagacttctgtcccaacgcaaggtcggaagctaggggtatcatctacccagtacgaatcttgggaaatagaacaacggcgcgccgcgtgaatgatgtgcctgtcgtggtcaacgtccggtatgttgttggattcaccccaagccatgtctgccaggcgcatgaacataggtcgcatcatggtccaatcgctgtaacgaatttcaggtacttgctggtaacagattgcagggaggctatcttcatgtgcttgttgttcagatgcaatttcagcagaggccgactcagcgagatatatcttggcatctgagaccagtttggcgggagatgggttggtgtcggagaccggtttggtatcagacagttggccaagaagacccgggaccagtggggtagggtcgggcacaatcttggagataggctccttggtagcaaacacagttccccaaaaggagttgcacccgtcctttgaatgttcgtcgctctggacactctggacactcgaggcaggagaaactagagatgtattcataggctgcagaacagtagtttcccaagatcgagcaacggactccttagaagagtcatcactgggtaggtcggtgtcctccatatcgctatcgtcttcggggacagagaaactgttggttgacggacttggatccggtttgatagaaatactatcgtctggaatgaccacatgctggggtttgagccactcaaccttgcagctgacttcgatgggctcaaaaacttctgtactcgattagttccagtgctattagacttagattgctaacttgccttggccacggtcaacatcgacaccgaatcggatgatgtctccgttgcgcagcggggtattcacgtctgtcaccagctttccaccattcaggaaagtcccgtgtgttgagccacagtcggtgatgaaaaccatctacaagggaggtcagcggggtgatctggtcagaattgggggatcaacacaacattttggtttggtagtatcttaagcaaagcatggtcacgagacatgacctgagactcaaaccaagcgttctctgctgtaggattgcggtttcgattttcacgctttgaggcacgcccgataggcacggtcttatcattgtcggtgatggtaagggtacgcagagggtagaggtcttcgaagagggggacaagcgtcacggtggctgtgaattagacatgtcagttgcaagtaaggtggcaattagggcatccaagtacttaccgcttgggtccgacatggtgaaagatagatgaacgatggtaggatttgaaaggcaggaataggatgctgtttgtttctagataatggttagactgagagatagaattccatatatgataagagcgaccatgacagcaaggtagagtgagtcacagagtatcggaagatgaaggggggtgcagaaggttaagggagttggagacaaaggcagcttacccgggtggttccaggctgcaacacgatcacatggaccagttgagacagccaggagatatcaggtgtattgcagaaaagtagattgcaagtagagcgactaggagcagcgaatataaagagttgttcaaagcacagaaggtgaggaaggataagggaaggaagaggggtaggttcgtgaatcaggtagtagttaggttcaccgctgacaacgcggacaacgcgggccttgaggagtagcgactccctttggaatgggactcaacttggttctcagttactggtaagtctattcaaattcgaagaaagtcaggattcaacacgaaactaagaagtaaggtatccggaagctcaggaacaatgaggtatgtatgagaagtgatagtataagataagcgaatgacgccgttggacttatttcgatgcctcggctcgacaacacttccctattggacacagactggctaactaaagaaagtatatctcaacctacgtactgagacttttcgctatttagttacttcctttttcgttgagacacagaagaacaacagagtccggagatgccgataaggggtggggtcagctgatgtggagacacacgtcatggtcatccgcacactagggggaactatgtatacgatgcaaaccatgtaaggaggatttcagagtcagtgagagcttttgaagtgtattgtaggtctgatgttaatgagcactatcattttcctctatggtacacaaattactacatggtcagaccccaatgcacttccccgggctcggtctgccgtccatcggcctatctcatcccgagtcttatctcagacagaccaagtatcaaaacaaaaagaaacgaaagaaggcggacggggaatatgtcaaccggtagtaaatacatgcggggagaatagtgaaccggggatccaaagaaaaaggcttagacaggaatacccaaaccggggcaaagaaagacgcgaagaaacgaagagtgaggagggtccgctgacttgcttacattccaggagcaccaccgttcacggcacccatggagttcaggcgggcagcgagctgggggtacttctcctgaacctccaactgggtgcgggtggcctcagcgtaggagatggcgttgatgatctcggcctcggtgcgagccagctcagcagcgcgctcgaagtacttgagagcctgggagaccttaccctgctggaggagaagctgggccatggttccgacagcaatgtcgcactcgggatcaatgatgagagccttctggcagaggttctcggcctcctggaagtcgtgcttccactggaacaaagcaagagccttgttgatcaggggcaggacgttgatacccatgggcttgctctgcgtctccatctcaacagccttgtcaaacttctcaatggcctcggagtagttctgctggtcaagcagaagctcgccgtagtagttgtatacatcagggacttcctcgaagttctttactgtgcggcggaaagtggccatcgccgaggcgacggagcccatcttgtattgtgtgacaccgagctggatgtgagagtaaatgaacgaacggtcgaggtcgatcgacttctggtagtccttggcggcttcggcgagctcggtcaggatgaagtgtagctgggcacggtggtagtagatatcggggtcgtccttgttgtgagtaatggcaagctcaaagtcatcggccgcagcgtccttgttaccaagctccaggtgcaagctggcgcgcttgatgtagctctggaccaaggaaggtgacagctcgacactcttgtccaggtcggccaaagcgccggtggcgttaccgccgaggtaggtgaaggtggcgcgcatgttcagagccaatccttcaaattcgtcgagctcgccgagctcaagtgccttctcgaaagcggcggcagcctcttcgtagccatcggcagtcttcttgcccatagcgacaagacccttgcgcagctggcccttaccggactcctcgctcaactcaatcgactcatccaatccctcgggcaagggctggggacggaagctctggaggtagttggagacaaaagtagcactaggcaacttcttagtgcgcgcctccagaatggcctggctcttcttctcggcaaccttcttcagcaagcgttcaagcgagttgcggctcacgtcgttggagaaggcatcaatgatacagctggctgtgaagtcgaggagagcctcactgtacttttcaaggtgctcatacgcaatggctcttcggttgagggccttaatgtattcgctgtccatggcgagagcggcgctggtgtcctcgacgaccttctcccagttggactggacattgtagcatgcggcgcggttggagtagaagacggggtcgggcttgcagataatagccttgccgtacaattcaatcgcgctggggtaatccttgattccgtaggccttgttaccggcagccttgagcttggccgcatacgcgttccgggtcttgacttgtcagagaaagtgtgggaaagaatatggcttaacatacctcttcagacagctctccaatagtggcctcatcgacttcgggaagctcctcgacaggctcctctgcctttttgacagactctggaatctggtcagtcatacgaccaccgtgtttgaacaagaacacctaccatcctgcacggatgcagccttttgctcctccgcctttttcttttcctttcgtcgctgatttttgctcttcttgggtgctgagggagtgggtttgcggggatcgttcaggtaatagacaacacccgctccggtcacgacaacggcaacaccggcaatggtgtaaacaacggccttgttctctgagacccagctggtgatgcgatcccagactgatgccgatgatgactcagtcagctttgatgtatcgagcaccacattttgggcgggcgtaggtagcggcagttcgttcgacatgatgtgcaaagcaaagggaccgacgcgactagttctaaatgtgggcagatgtcagtactcaatccaatgtttggcgcaattagactgagatggaagacaaaggggtcacttaccagacctcgacagtaggagttagagatggggaagttcgggaatgatgaagctcagaggaaaagtcaagggttccgctgaccgggtcggccaatcacgcgcactgcgccggtaacactccacaaaacatatccggattaaacagagtcggctcatcaggtttcttatctcttatactcttccctttttgtccttcgaattgcatccgaagtaacatctgtgaattcatttcctatttggcaacactgacctggcgaccacagtaacgacgttacgccattgactgtcgcaaaaatgaccgagaactcctcaagcccagaatcattcgagatcttttcttcccttcgctttgacccaagccttccagacgcagcctgtcgccatgcatcgagctatcccgatcctcaaaaatccccctactacctcctcgcctatcaccaagaccggctcacagccgcagcggctcatttccaatgggacgaggctctaaactggctgcagcaagacctgcaagacttcgaggcgtttctcgacgcgtcaatttcggacctaagcaaggcgtggagactccgaattgtagtgaacagtaaggggaaggcgagagttgagacgaacccaacagcgagcattgatctaatgagtttgttcattccctctctacatacccacccaagcgaaccaatatggcacgtccatgtcgatacgcaatcaacaactccttcaggtttcaccacacataaaaccaccgcgcgggatgactacacgtctgcgcgccagagggcgggaattaattccccgacagaccttgccgaagtactggttgtgaacccggatggcgaggttatggaaggcagcatcactacgccgtacttcttgcgggaccatatgtggatcacgcctccgctcagcagtgggggcaatgcaggtacaacacggaggtatgcgttatctcagggtttctgtttagaacacaccatttcccgagatgagcttgtggatggagaggagtgttggttgagcaacggcgtaagggggttcatccgaggggtcatagtcaaataagaatttcccatacttagtatatcttcgataggtatactccgtatatgtggacgagtcgatacttgaatggtattgataaattgatcaaaaggctatgaaatcatccgtatttttgaacatgattgctccagaaaatgctccatcacaggtctatttcttagccttctcaatcaccactgggttgggattccccttccactccaagggacgaggacgcatgtactcggccataatctcgtccgtaacctgtgctctgcgctcctggaacccttgaacatacttctgaagctcagcgatacacttctgcttgatctcgccggtcatcatcttgccaccctcgtaatcggcacggatgcgctccagctcctcgtcgtcctcgaggaagaatgtcaagtactggaatgggatatcgtttttggtgttgccgcccagctcgcgctgcaactccgcggtgtcctgaccacctgagaaagcgtgcttgttgatcttgttcttgatcttgttaggcgtgtcgctcatgaaaatggcggaactgtcgacactggcggacatcttagatccaggtccctgaagggcgggaaggaagatagagtgaatgagagagggcttcttgtacttcatcttctctgcgtgttcgcgacattggcggaagtaggggtcctggtcaatggcgcatggaatcaaacaaggaatcgatgccaccttcttcgtctcggtgccgaagatgtgggggaaactggtagagaaggcggcggcggactgggtggcacagaagtggaactcgccaatgttgttgctgtcgttaaacccaaatgtgcccttgacctggttgattgtaattctcttggccatgcggcacatgttctcgtagaaagcaccaccaataaattcgaaatcactgaagataaaggtctttttcatatcgaatccaacagcaatgatatccttggcgtttgcttttgtgtatctcttggagtcctcaatctcgatcttctgggagtgcataaacttctcgtcgtcggtcatcatgataacgaggggaacatcgaagacgtcctggagccatctacatttggattagttctagtaatgtcccggtgatcgagactaaacatacttggtgaactcgaacggcacagtgtgtccgacgtgcatgctatcactactcggcccacggccagtgtagaggaagaatggctcgcccttctcatgcttatccaaaatcttcgacagatcacggtgactgaacacaatactccggcgcatgaaacggtgtggccggtggccagtcactttctcgaagcgctccaatagagctgcattgatgggtgtggctccaaactccctcgtgagcttctcgtaatcgaccggcaacagcttgccggattcatcgaccccaccggagacatcgaagggcgtaacgatctggccaacggccttggtctctggggttttctcgtcgatgctcaaggagttgagcgccggaggctggattgcttcgttggccatagttacttcttcgtctggtacaaattgtcagttccaggtgttcaattgtatcagtcaaaggccggttctcactttattttcggttgagagaatcgtgaatttcttctgcccctctccaatatcgcgggatgagtcaggattcccgctatcagtgggcactctgattggtcgatttgatacattatcaggtgaccagtcctagccccgcgaaagcctttctttgtgattgttattgtgtttgttattgctgtcttgataaattgattttgagttgataaaagtgtgagactctctattacattaggtcggcatctctgttgtctttgcattgcattcaaagtttatatctggaaacagagtgcatcaagaccgatccggcggaagtatatactaagacactcactcctccaaggccactagtacttctttttataaactgcagaaaaaatagattaaaccaaatttaactcatccctatgtccatagtatagacgcttctcaggccccccacgatagtaacgagttgaagaaattcggcttctacctactaatgtaggaaaggtggccataggacgtaaaggtcgcattatcctatccaaaaagccagcgaaggagttctcaacagcattagcaataaaggctaaattatacgaggcaggttctcataaacgcctgcctgtaccaggtaaccttaactcaagtactatagggatttagactaactactcaaactcccagagaatagttagtcacattttatcgtggaccttctaacttagtattaagacacaccagattcccaagacaattaatgaacagcccgaagacatcttgatgacgtccatcttccagcgccgatcatatgtcttaagatcaacattccttcccacaagttagtaagagacacattccacagagaaacaccggccatcacttgacgaacatcggaatgcagtttttactttggaacagcacaggatccagacttggcagccccctgcctatcatgcaccgatctagaatccctgcccaaagctattgtagtctatatgctttcatgacatgtatctcgcgtataatgtatgtgttggctacaacagcgaatatatagctcgtctttttctcgcatgcagtgcggacattgtatttatggctgtttcgatagacgcggaagacgagcctggatgtataatatgtagtgcagtttcgtattgaagctgaggcttctactattcctctagctatggctggtatcgatggcatgtgtcaattctatattcaaagaaacaatcataaataatgtcggagatacgtatggctggttccttaaacacaaccactcgatcatatttgtctatatactcggaatcgtcttctgctttaggaaatcaactatcatcaaatgaagcggatgccacccaaatcccccacctacacttctacctatgcccaagatggggcaaatgttggatccacatgcgctagcgtggctaggcactttatgagatcccactgttgtgggatctatctcagaacggtatccatcttcgaaaaaaaaaaaccgacggtctagagccaacgtcattcaaggatcacgatgatttctctcccgtgaaatgagacactctactaggacaccccggcttctcgcataccgtcagcccaacagtctcagtcaaagtgatagagatgcgctgtactctactccgtactcagtataccagcccactttcctagctcccaataagcacctactccatcccaccaaccactacccaccttgccccgtggatgcgcggggttaccacccctcgacccgagactccatgcagcaagccgccgctaagaacgccttattcgacgggcctgcaagccactactccgtatatccgacccccttacgccggactatcgagtatatctccaaatgcgtaaaccgacggaccacaccccgtatgattggtgacatccgtcggttaatagcctaggataacgaagtagactttggcgggtgtgtcactcatgtttgagattctgccggtaagcttgtgttttcggtctgctgcagatgttggtggcttttttgataatcgcacgttattgatggttttggttgagggagaaggactgggatttgatatcggctttttggaactgtgggaactccgaaggggtccggttgacacgtagcttttgtcgtgttctgtgggaagggatccccgcttgctttgttggctgtatatattttgtgatattttgctcagtctcggcgttctttgttttatgctggggttggtttcactgcgtcggattattcccgtggtgggggtgaagtgccgaggctatggtcttataaattgtttttggactggacttggattttaattttgactatgggctcctcgatactctgttgtaggtttcaaactcctcttgtagtacagagtacagcaggaaggtgcaagagtatgcaggggcaaagggcaccactgccgaaacttactgcaacctcgatttacgttctagtaggaatggtagaaatacttactattatctatatattattcgccactgcgattttcagggactctcagtgggtgaggtgaagaagatcagctctagatttgcacctgggcaaaatacgcgatagtatgaaaccaaagccagcccagtatgcagctagctcaatcgggactaatgtgtaggttgcctttgcttttgtacctttattattagctcatatttgactctaacgggtcatcgtatcgtttagatgttactttgtctaggggatgatggtccaacacgaagataagacaaatacctcatttgaatataagatttaacctttctaaataaaggtctgcaattatacagcttttaaccaaatgcgccactgctcaagagatagctggatggttggaggcttggacgggaatgcaagacatgctcacaccgcaggccatcatgagattgtatcaagcacctagaacaagttcaagggagattcagcctattgcgccagccagtcagcgtcaacggtttcctccctacacgcgtaatgataggtgtcgggtgatgcggcggagcaaggcaacacggatggtggttggctggatagaatctcctatccagctcagggatagattagcttcagcagaggaagtagacggatgacatgactgggtaaatcactgtttagttgggagttagtcgggacgtcactgtgttgagttaggagcgtgcgaatcagaaatgaccaacttgacgcatgacaccccggtcaatcaccgactggacggggatcttgatcttttttgtttgttttgggcgtccattcccgctatatctaaacttgattatctccatttgtgatatgaagaagtgaattttttgtcttttttgaagtctagcccttgggaagagctgggtcaccgggcggctgcgcgtggagagcgatgtactcggtaccttgtgagatattggtttcacaggtgcctggcctgaagcttttaagaaggacgattcctagttcctgtctcctttctctctcactcgtcttgaagagattgaacatattagggcaaaggagttccctgcagtcccactattaaaagcggcaccttcgtcatcccgtccccccaatcttccaagaagaaaaagaaaagtctggatgtgagggcatcggagtcctcggactcgtctaagtacgcgatttctatttttttggtctcgtttcattggatttcccagtttgtgcctccttttctgtattttgtcgtcattggcaatttcttttgttctattcttgactctttggtggagtttccccccgcaagtgcttcatgcacactaaccgggaaaaaacaattagatgcaacattctccctcggattccccttttacgttttccttctcttcttcttcttcttcttcttcttccatctacctctcgtctcgtaatagttcatttacaccaagtaagtggctcaattccaggcttttgtctttttcctagcctatacctcgggttcgatatttcttctatgactcgtaaaacatattctgtcggctatcgcgatacgccttgcattcttcgctcaacacatgtggcattctcatactaacccaaatctccaggcctatcatcggcctcgtatcgacgctccgcattccaaccaagagatcatcttgaaagtctgatcacgaaacacggctaccccacacctgtgtcactctcctctctgcgagatctgacggccacttcgtctacttatactcccccttcgcctcggcccagttacccggatcccagtccgatcgacacttttgactcatttactttatcatccacacgacccattcctatcccaagacgccccggtccattatacgaggatcttccagtgacaccactcacgggtcgattcgatcacgaatcttattttgacgattgggaacgtgcgtctcagtccgccaagtcccgacaaatacttccaatccggcctgtccgtcggtatccatcgcggccgctgccatcctcagcaataatgcgtgctgataactcaccttactactcccctgctgcctcacctatcatgtccccacggcgctcaaactctccgcagccaactcgctgtcgtgcccagaacccttccaaagtgaagcaaacccagaacttccacctcggcagcctgccccggttccatcctgccgtatatcagtcgagcagcacttctcacaacgctacagcgcagcctccatctcctcaccagtctcggcagtccacctaccgcactgcagccgggtcacgcgacatgatgtggcagtaccgtgaatacatcgagggcgtccaccaaggtccttcggcgccccgtttggatcctctggttagtccgggtcccgtcacgcccctggcgctagaggcgggtgattatctcgcccatggctccatgaacaacacatccgagcggatcccgcgagatgtcccgaagaactccggccctccggctgagctggtggagaagctcattgcctatgaggagatggcccgacagatggcgcgaaagtccgccaagggccgatagtagactgtcccaccctggctctgcatcaaaatgtttttgtttattatccattagagaaatgggaaccccccgaggttcttcctgcctgttcattttatatctgttttattggtattcgggaacaaatgagctcactccaggctgatacagtgtgcatgggtcttttggttttcatctcttttttcatctcctttttgttatctcgtcattcttacccctcatggtcaaacttcctcggcgtcggccgactactgtgtttgatcttgcatcacggcatcatgtatctaaattataccccgctctagtccagtctcggaccttggcacatccaagtttcaaccttcaatatcaaacatattattcatcctcctttgtttgaccacaccaccgtggcagctaccaacctggcgccgtaacgtgtccttccaaaattaattgttacggtcgtaagccaagtcccctgaggcgtagtggacatgctagtttgacacttggaggtgtctgttagatcatatccgcttcacttgcagcccgccagggcagccgtgtagcccatctggagtgcctttctaatctccagtaatctctagtaatctagacaatgaatttttatcatgcctttttttttgatcttgtacgactttcacccggcttcccaccaagtcgcttcgagatcagcagtcccgataacccaaatcttacagggatgatatgcagaccttcaaagctaatccccagatttactactcccattagggctagctcaaactgtagctcgaaatctccaattcacgcctaaggcatcacccgcgattcggaggaacactcactctccccgagaggagtctgcggggcccaagcgattatcataccgactcccctcgttaatattttcctcaattacctcattgcagttcatatatataccccagcttccccagacaagacgcgccggcttgcaaaaaccctccttggcagctcagcaaccccaaaccactctatccttatcagcatcgtcatcacatttccaaggttcgcttttaccgcccacgcgttgcgcacgagcaccccacgagtccagcaggcgtcatttccgtgacgcattggatcgccagatccaggatcggagattggggaaattgggatcgagattcgattcttggacgatgtcatcgacgccggcgcctttacctgtttcggagatgacgagccaacagaaggagaacgcgcttgctcagtctgggacatcgaagtcgaattacaagggctttgtggcgggtgttttttcgggaattgcgaagcttagtggtaggttcaagtgttctgtggtttgagttggggttgaagctaatttttgtttttttagttggccatccgtatgcagaactgaactaaccccttcgccttgggtcaattgttaacgaaatcgcacagattcgataccgtcaaggttcgcctgcaaactagcaaagatgtgcagttcaagggaccgttggattgcacgttgcagactttgcgaaaggaagggttacaagggttttacaagggagctacgccgccgctggtcggatggatgatgatggactctatgtgggtgttccgcggtatcaagaggaataataggaataatgctgactgtctgcagcatgctgggctccttgactctgtatcgccgattactactcgagaatgtcttctcgaaacctcacctccgctcttacctccccttctcgcgctaccagccagacctcgcaactctccctagcttcggacatggcattgcaggtatcatggccggtacaacggtcagcttcatcgcagcccccgtcgagcacatcaaggcacgtctgcaagtgcaatacgccgccgacaaatcgcagcgcatgtacagcgggccgatcgactgcctgcgcaagatggtgagtgccaatgactacattacatatacacccaccgactaacatggacaggttcgcacgcacggcatccgcggcctctaccgcggcctctgggcgacaatcttcttccgctcgtttttcttcttctggtggggctcctatgacgtcctgactcgctacttcaaagagaacaccaagttgtccgcccctgcggtcaatttctgggccggtggtatctccgctcaatgcttctggctcacttcttacccgtccgatgtcgtgaagcagcgaatcatgaccgatcccatgggtggtgcgctgaatgacggcaagcgacagttccgcggctggaaggacgctgcgatcgccgtatggcgcgagcgtgggtggagagggtactggcggggcttcgtgccatgcttccttagggcgttcccggcgaatgctatggctctggttgcgttcgaagccgtgatgcggaccttgccctaactccttcacggtctacggagaacacgaacccaaaatgattacatatagaactttcatggctagataataaattagatgaacatacccgttgtttatgcatgatttgtctccgatgaagttaatctcggcttggggtagtccgcgatcaggaatgtgtgctctgtagcgatgagccgcattcggcgatgagactcttcggggccctccttgaagcatcccgagatagcacggagatactccagggtctaagcgaatcccaattcgtaattgggccatgcagctgggattgtgagctcggccgccgaagggtcctcgatagtgaggtgacatgggttgtcttggtgctgtctcgttccggacaaggcaaagaataaaacttatacattatccatagctgttctctttaaaacttacactctctttcacgtcaacattatttcccgtagtcgtcagcaggggaggaattgaggcaaattgaatctggttccttagtgcctgaggcagtcccgcagtccacgtcaacggtttcaccagacagcgacaacgcctcaaatctccaatttaacgaattaacgctgatcggccatggccgttgcacgctccatgcgccgcacgagcccaatcggcctcgtgctagcagcgctgctagcatttggcttcatatgcttcatgctctcgccctcaactccctccgcaacctccgcatccgccagctcccaacagcgccaggaaaacgccgccgaacaccccctctccccgccgaccaaacccttcttcaaatctcaagccgtccgcagcgatggcttcaaggccgccccgccggtcgtgcactacgacctcaacagcctaaccagcaccgcggactccatcgccaacggcgagcggatcctcatcctcaccccgctagcccgcttttaccaaggctactgggacaacctcgagaagctgagctacccgcacgagctgatctcgctgggcttcatcgcgccgaagacaagcgacggcaacgccgcagtcgcggctctggaaaaagcaattgccaagacgcagtcggggccaatcgacaaccgcttcgcaagcatcagcatcctgcgccaagacttcgacccgccgttgaaatcccaggacgagaaggcccgccatgcaatggccgcgcagaaggagcgccgcgagtccatgagtcgcgcgaggaacagtctcgtcttcacgacgctcggccctgcgacctcgtgggtgctttggttagacagtgacgtcgtcgagacgccgaataccctcattcaggatctgacggcgttcaatcagcccgttatcgtgccgaattgcttccagcgctactacgattccacgaagaagagttgggatgtcaggccttatgacttcaattcttgggttgatagccagattgcgcagaacctcgctgcgaatatggggcccgatgagatcctcttggagggctacgcggagatgccgacgtatcgtaccctgatggcgtacttgccagatatgaaaaatctggatccgaagaggatgcttgctcttgacggtgtgggcggtacggccctgatggtcaaggctgacgtgcatcgtgacggggccatgttccctgccttcccgttcttccatcttgtagagacggagggcttcgcgaagatggctcgaagactgggatatgaggtcattggactcccggattacttcgtatgtttcgtctaatctgcatttgcagagatggggacaatcttgctaacatgctttttctttttttttgcaggtctaccattataacgagtaaatggttgacagcctcgtttaacgtctatttcacttgcatacactgcgctgtgcgcgtctcgacgcctttctcgtctctctgggccattcgagagattcattagcaacattcagctccgtgtccgtctctctgttgagggggtttatttcatacgtgcttgggatggttgtttccccaggtctcaaaattgactttgcattattctgtgtattaccaaggaatatgagtgggtatctatttatgttggagaggagttagctccaaggaccaagggcgttgctggcttgatgattcttgtgcatttattttggctctaacatggctatctccatgttcaatgaacgttacttattcgtgcaagattgaatttaaatgaatcatattagagacataaaaagcaccatagtatctagtagcaaggcgttggtctatttataactcgtcacttatgtatccttttcaacgagccagaggtatgaacttttgtcgtgccaaggctaacagtgctgggcacagtatgatattaccggtgtataccagcatataccaatgtccgatacaacaatcaatcccaagaaatactataaagcgtgtcagtgatattgtgcctggaaagcatggcggggcgaatggatacttacgcaagcataataccggctccaagagcaacagccaagaactgcgtgatagtcttccgcacctcaacgcccttatccttgccagtctccagcaactccggaatcacagccacggtgccaacatacaagaatgtgcccgccgtgaacggaagaagcatatcaccccaagtaaggctagttcccagaagaccagcagacttgctatcatccaacatagtgccattgccaccgaattcctggacagcgattccaataaaagtgcccaagaacgcaccaatagcggtcacgaattgcgcgcccatggccttgcgcttcgagaagccagactgaatcagcagagcaaagtcaccgacttcatgggggatttcgtggaagaagacagccacagtggtcgtcgcgccgatagtaggtgaggcatagaaagaagaggaaagagcaaggccatcagtgatgttatgggtgaagtcagcgatgagattcaggtaaccgccaagcttgacgctggggttgatttctttctcgggaacgacctcagcggactccttggcagcagacttgcgcttcttcagctcgccgctggtcttcttgctgtcagctccggatgtaactgcatcgactggttctgtgtgcgcgtggctgtgcgagtggtcatgaccgccctcgccgccagtggcgatgcgcagggttttgtccattgccacgaaggtgaagaatccgaccatgattcccagacccagaaggaggttcttgtttggctcgaccattacgaagctcacgtggtcgggggaggcttcgccgacaaagatctcggggagtaggtggaagagggtgtcgccaagtaagccgccgacggcaaatgcaaccatcactgacagagaggaggggtcgatgttgggtgggcatagtgccaggaggaagtctagagcagttagcagaggcatatcacgagtaccgagggaatacttactaggtgggccggagatatacaaagttgccagaagcgcgttcacggctggggtgctcgggaagaggacagcaaagatcttcgctgtcaagctagtggactctggacgagttgcacgcttgtgctcattgagagactcgactagtgggcagctctgtggcaggtcagtttacatgtaggacacacagtacttgtacagcatacctgcaattgctcctcgatctgacccacggagagccctccgggaccaacattagctgcagctaaggctgagaacaaaaagcatcctgcaagaagggcaatgcctgtcctgcgtgatggaaaaaagcgagaagccattgcgaatgaattggccagggtgctgtaaagtgacaagcaatactccgtatacccacggaagtagaatccccgtggacagctgagccgctatcgttgtttatcgcgggacactgagcaaacatgccaagccttgcaaactcggaaaaaaagtttcgataacgcttttttattatcgccgactccagcgaagaagaaccaattcgacctccacactcacttcacaattcacaatgggtaaacttttgcagaagaagaaggcccgctccgggcgctccatggcccgggccaaggacagccgtctcaagagcggccacaagaagatcaatgtgctgggaaatcagatcatcgccgacaactggtatgcacattttgctcaacttgaaaaatacaaaagctaacaactgtagggatcgtggtctgaccctgacacaaaattaccagcgccttggtttgatgcacaagctgaacgcaccatctggtggccgcgaacgccttcccggaaacgaggaccaataccccgagaacaagaactcgctgcacatccgcggcagcgccaaagcagccgcagccaagctcgacctcggcgagacacgagtcgagcgcgatcccgagaccggcaagattctgcgtgtcatccacgacgacgaagacaacatccaagtggcgggcctcctgcgctcgcgcaacaaccctctcaacgaccctctgaacgacatattgggaagcaagggcgagagcaatcctctcgcagactcggtgattgtgcaacaactcgagcgccaggccgatcaggagggcaagactgtccgtgctaagaagccgcggtaccaaagctcgcgcgagggcgagtgggctcagcgcttgattgagaagcacggggataattacactgctatgactcgtgaccgcaaactgaaccctatgcagcagagcgagggtgatttgcggaggagacttaacaagtggaagaagagtcagtcgtaatgccttcatttgttcagagcatctggttagggcgagtctggcgtttatatttttttgtttatcaaaagtgtctacgtggatgcaatgcgtcccgaagtaaatattattggacggcgactgagccgcttggattcgttatactgttcctttagttgttactgctgagcgtcgagtaggtgacacccccggccggcgggaggcttattcgttgcaccactcgtacccatcgtcggcgtctccattctcccactccgtaggatgcagtcccttcctcccaatcccgttgcgtcttctcctgctccttgcccttggtttccttgggagatggtgggtcatgtaggtctccgtaggctgacgtcaaatcgtcccctggttcttgccgaggcgggggcaagtcccaaacccaaccaccgacttctccgacaatggcattgccttccgcattcacgcctgggacctcgaatccaacactagtgatcatgcgctccaagacccattcacggcagtctaggtcgagttcccacttcttgctcttccaagcccagccacgcggggcacggacatcctcaaagaatcggcatccacgagggcggtccccggcaatgcgagatggtgatagcgggtcgtatggcgcgtggctgaagaggaagctctcccacccagactctgacgttcctgcggcccggtgctgcagctcaaaaatttccacctcccgctcctcgggatatgtgtccaaggagatatctgcgagtttttccatagccgacatcactgcggatgggtttgtagagaccgatgagccgaacccatcattcttgtccgattctttgtctgaggaatttccattcatatcttgcatcaaactccagaggaagtgtcccaccgttgggtggatggaaagaaccagtgcattgccgcaaagaagcagcacaagcttaaggggcagcagatgcgcactgatgaacaatactactatagcaattgtgcatccgagaaatagagttgaagagagcttctcgttggagaaattcgtcagcggcgcaaagacagagagggcagcatcgtgggcgtctgagaaatcagccatgcaattctgtagatcccgcatgttccgaaggaagtctttggaagtctctggtgctggcttaatagtcgtggctggtgccagcgctggcccatcataggagtagtaaggagtagtgatggacgtcgaggtgcttggaggtggtggatgacgagtcgcaaaggacggcaccattataaacagtaagataatcactagaggcaaaacgaaaaggagatggggttctaagcagaggaaagagtagacaaaaaggaaggagattgtatgacttggtgtgtcccaggtgaatagttgctcaacacggctctggaacagaaataccacaccgattctatagtagttttagcctcggtaggatatcacatgggacgattcgattctaccttgcattgaaacggcggaaattgtttgccattacaggcaaactaaaagccggtttctgaggagaggcaaagaccttgtctcccgctgaatcattttcatcctcatcgtccgttgggatgacttgttggagaagcctgcgatcgtcagctggaacacggatctatcggatttacccaggagcaaacccattccaaacatactttgtaaataggcggtcttgcagtgagttcttggatagagaggaagacctcgaatgcgagctatctggcgaacccggtctattccgttttgtgggcttgggcatgtcgctcagtgcttctgtaaatccatccatgactagacatgggattctacaggaagaagagaggaggtgaaaagggaagagaagtagttagtcctccgtactccgtagagagtcggcaattatacgatcagccccaagcacatgctttgccgggaaagaggctgacataatcccgtgtgtatcaggggaacctcgaggtacgatagttcacgaagaagaacaagttggtctcattgattctttcttgtacttgattttttttcagatatacatgtgttttatatgtgattcttcacatcccacttcgatttcatccaaaattctctttgtggaccaggtgccctataaaatccaccttcccccccaactttttccctctagttaccgccctagtggacttgccccagcaaccctgcttccccccaaaattatttatcaaagagaacctcctggcccttattgctctttcacaactcgcaatggaacggtaactgttttcaagagtcgcgcgacggtgctcaagtatctcctggttgagacctcgcacttctcctgaatgcaattgcgatcgcctctctggcacggtccagtctccttttccgactttacttgagagacgcgggagcttaaacaatgccaacaaagccgcaaacactggggaggggtcaagtacggaccgaagcacaatcacacaatccctcacatgatgattcgggctccggaggtaagagttgagatgtcgggaaggtgcagctagatactaacaagaaatagcagaggctccggcccgcaggctcctgcagaagtcggcttccacgcacttcccctcgaatacccattttgacacatcgaatggggtcgctggtccgcgcacgggtgggataaataggagaagactgtcaattcgtgatagggttcctcagggcccacggccacaagatagttcccgatggaggtatgtctagttctgctctcgtaattgactcctgaactaatttgatatctagcaaacctagtccataccttcattctaatacctcgtctgtcgattcgacgatggattcgaccaaaagcttcaaccttcgatctacgagcgtgggcaacctggcaaaggctgattccaatcatgcagacaacatggacttactagcgccggtcaactttgatgatttccataacagcatcatgggtgagcctagcctgaacaactttcccatgcccgcgagcagttcgggtgagaatcgtgaaacaggtcctccggcaaacccctgggaaagccacacgtacgcggccaacgtatcggaacgtgcacggggtgcttccgctcgacgaaagagtgaggtgcaacgtccgaatggtccgaatgctgcggcagggctcacggcgtcctcggccaacacccgcgcccgccgccagagtatagcccagccgtctgccggagctgctccaaggggtccgcgcaaatctatcagctctggggcatttgcgcctaccaatgcttcggccagacgcgccagcctaagtgcccgcaaaatcagtaccgataccgcggcggcaaataatcaccttcgccctcgacttccagagtctgatgctagagctgctcgaaacctcaaggcaaagtcattccagcccggcccaagggaacctcgtggtccgtttctcactccctctgggaacattgaccacacacgatcaaattccaccaatgctgtgcggagcccggtaagaaactcttctgccgccgtagcgactccttcctctgcctctaagcgggcttctgttatgccgccacatgccactggacttggtgctcgaacgatcagtcccactgacgcacgacgattgaagcgaatgtcgattgcgcctcctgctcctccaatgccaaatacgcctcccacccagacagaacctcttcccatctgccctatatcatccactcaatctccctctcaaattccgaggaaaagcgtcacaccttcctcgaaccgaaccacgcctgacccaaatcgaaagtcgtacagttcggggctgtctgcttcttcaagcaccagctataactcagtgcgaccttctgcgggctctcttcaaaaccggctgtcccaaaatctatcttcctctcgacttccgactcccaagccacgcacagaaggaaatcccaacggggaagaggtaccaccggttccagcgatccctaaggcctacgagtcgcccaaaagtgaaatggatgcacctgtcttccccacgcctaggaaatcaagtattcctgtggatttgaacattttgaaagattcagactccgaagtgcattccatagcccaagtcgacaaggttgaccctgtagaagcgaaaacccctgattcacgaacacgaactactaatattgtgggaggacgaaagggtttgcagcccttgaaattgcccccgctgaacttattgcctctgggcacacccatggcagccaaaatcgaggcactcaaggacagggacgaggagcacagagctcacaccccctccaaacaagtgatttcaaagacgcccagtactccgatgacagcatccaaggcgaatttctggtaccgtgatgaagacgaccaactgcccctcactcaggcacgaagcagcacctctcactttgccgtcagctcaaccgcgtttcgagcttctagcagtaccagcgcgtttgagtcatttgacacgccaagcgcagctcggaacatttctccttatgcctcatacacgctgcctaagagcggtgctgagctcaaccatctccgccaacagatcagcgccgactactcgaatcgaacgcaagcacacaagttgaatggtccacgacctcaaactcaaactgccattatcactcctgccccggaacggctcagccagatatcgacaccttcggagcctgagagtgtaactgtcgctgcgtccagcacctctcttcgagaccggcttaaggtggcacggcttcgcagcaactcgaagccccacaagccagaattcgatgctgatccagccaagtacaatgctatgccgccgcccaaacttccagcctctgcaacatggagtaacctttcttctgtcaactcgacgagccctaatcccaagccatcatatctcactcttcgccgccagtcttctatctcaaataccacaaatgcgacgactcggaaaccaagtgtcagcagcgagaaaagtctcgccttggagccaactccttccaatgagtcggttgaaagcgaccgctctagacgtgtgcagagctcgtacatctctcctgttcataagatgatcaatcatgctagatctagtgttgccgctgccccccggtctaccgacagcactgttgatccagatgtgattattgcagatgaagagatgaagcgacttggggccaaacgcaaagactttgaaaaggcggcgcgggtgctagacgacttgcggcgcaaggctggaccaaaggatcgtgtcagtcccgcccaggccttgaagatggccgcgctcaacatctttgaacgcggtgagatcattgattatcgcgatatttacttctgcggtactcagaccgccaagaaacatgttggagatcttcactccagtgcagcgaacttcggttacgatgatgaccgtggtgattataacatcgtcgtcggcgaccatctggcttaccggtacgaagttgttgatgtcctgggtaaaggtagttttggccaggttgtgcgatgcgttgatcacaagactggagctctggttgcgattaaaatcatccgcaacaagaagcgattccaccaacaagccctgattgaggtcaacctcctacagaaactgaaggaatgggatcctcatgggaagcatagcgtggtcaacttcacccaaagcttctatttccgtggtcatctatgtatctcgaccgaactccttggcatgaatctttatgaattcatcaaggcccatgaattccggggcttctcgttgaagctgatccgtgttttcaccaaacagatgctgagcagtcttgtgctgttgcacgcgaagaaggtcattcactgtgacttgaagcctgaaaacatccttctcgttcacccattgaactctgaaattcgagtcatcgactttggttcgagttgctttgagaatgaaaaggtctatacttatatccaaagtcgcttctaccgttcgcccgaggtcatcctcggaatgtcgtatggcatgccgatagacatgtggagtttaggttgcattttggctgagctcttcactggctatcccattttcccaggcgagaatgagcaagaacagcttgcttgcatcatggaggtctttggtcctccggaaaagcatctcatcgagaagagctcacgcaagaagttgttctttgattccctcggcaagccgcgtttgacagtttcatccaaaggccgccgacgtcgtccaagttccaaggagctccgacaggccttgaaatgtgatgatgaagccttccttgacttcatcactcgctgcctccgctgggatcctgctcgtcgactctcgccccatgacgcattgaaacacgaattcctcactggtgtcaaggcgccccggcccaggatgtatgcatcaaactcgccccccaagcgaggtgtcacgtccgggcctcgtcctctcccagatcctccaggcacaactctgaagagcgggttcatgcgtacccgcgatgcttcggccaattccccggtcaagtctagcggcaagcgacactcgaccgtgaatggcattccgtccagccccggcaagcgagggtccagcaactctactgtcgggtccgcgctcccccgcgtttcggcgcggaatatcagcgggaagcccgacctcgctactgcggcggctgcgaccagcctggtgagttaggccagcaacctgaaccggggccagagatgggatgctgaccagccgctagaggaaatgatcttgcacgtttttttttctgaatgcgctgtaatactaatccttgtttttacgttctcatccttgcatcgggtggttgtcatgttagcattttgttccttgagatgcattcatgttatacccccttgttcctgcatttgcattgcgcctctgatgacctgagtgttcgcttataccttatgttttgctcttgcttatgcatttccttcgtttttgttatacttgatgaaccccattagggccatgtgtggtcccttgtacattgttacctcttattgcatttcttaagagtttatgtgttgctcatgggtagagcgatttaacgttgtcaagtggcgtctatgctgaattaatgaccatgtgatttttagttttacaacttctataaataagagactgaataataaagacacgttaaagacacgatatagaatgcacgttgttgtactggcattatccccactgggcaatcgggctacttggcctcatcgccttatcttagttactccacttctacaacaactttggcctttatgggtaattgattcgcaatgaatggcttcgaatctaagggcctggacgaagattccttcggcggcaagcctggtctgactgccctgaagaccttcgacgcctttcgtgagtaccctcgagattcaagctaaacaaaagctaaccgacctccaccagccaaaaccaaagcctcctacacaaccccaacacgcagcggcggccaatggaccgtcctgatcctcataatatgcacgatcttcagctggtccgagttaaaaacctggtggcgcggcaccgaaaactaccacttcagcgttgaaaagggcgtctcacatgagctccagctcaacctcgacatagtcgtgcacatgccctgcgaccagctccgcgtcaacatccaagacgcagccggcgaccgcatcctagctggcgagctcctcaaacgcgacgacacaaactggctcctgtggatgcaaaagcgcaacaccgagaccaacgccggcgcccacgaataccagaccctctcccacgaagaatcagaccgtctcgccgagcaagaagccgacgcccatgtcggccacgtcctcggcgaagtgcgccataacccgcgccgcaagttcgccaagggcccgcgtatgcgccgcggtgtcctcccggactcttgtcgcatctacggcagcctcgagggaaacaaggtgcagggcgacttccatatcacggctcgtggacatgggtatcgcgagaacgcgccgcatctagatcactcgtgtatgtgttttactttgtcacaacccatctacagcatcgctaacagctatcagcattcaacttctcccacatgatcaccgagctctccttcggcccgcattacccgaccctgcagaatcccctcgataagaccatcgccgagagcgaggagcactactacaagttccagtacttcctctcgatcgtgccgacgctgtacagtcgcgggaagggcgcgctggacgcgtacacgcactcgccgcagacggcggccgcgcggcacggacgcaacacggttttcacgaaccagtacgccgcgacgagtcagtctaccgtgctccctgagtcgccgatggttgtgccggggatcttcttcaagtatagcattgagccgatcctgttgctggtcagcgaggagagggccgggttcttgtcgctggtggtgagggttattaacaccatttctggtgtgctggttactggtggctggctttatcagatttctagttgggctagggaggtctggggtcggaggaagaataggtcgtcggaggggtatttgacgggcaagtcttctatggattgaggttattttggttgtttcacttcgaatgttttccttgtcttattatatcgtgttccatcatatatcctacgtcaattgcatcaggagttcactctttgcatcgaagttcattggtcaactcggaagtcgagttcgacctggtatataagtagtaattgatcgtacatcccgcatacatgatgcatgcaaactaaacctcaaatatctcccccatgcctacgccagcaccctctgcaccggcacggctatcgaccagatccagacgccagccgttccagtcacgcagcttgctcttgatatcgcgcatccattcaacacgcttccgggcttcctcctcggccagcgcacgcgcgaatgcatcttcatcgaactcgtcatcgaggttttcttcggaaacaagctcgagactaccacgggtaccagggggatgaggggatgaagtttgagcgcggtttccaccaactcccgtaaaggcagcaaagccgctagaaagtactgtggagaaggacgagtgctgctgctgctgggccatgctgcggcgacgcgcatggtcgggtcgtccaccgacgagatcgacgtcgtcgaatgcattcgctgcgtcaccggagacagcgctaggtccatcatccgggtagtactccatctcctggcgcttctcttgccagacgccgcggcgcagatcgaagacctcgccttccagctcgcggattcgccgctcaagacgctggcgttcttcgtcctcgagctcgtccagggcttcatcgtctgcgcctccactggtctggcgagttcgaatccgatcactctcttcgcgtagacgcaggttctcgttttcgatgctagcgatctttttccgcatgacagcgatttctttgtcggatttctcgctctcgcgtagccgtgtttggtgccgggcttcggtttctttgtgaaggttgcctattgcctggagtttcttgtcgagcgtctcgattttcttttcagattcgctcttttcgttcttatactcctcaatctcacgctggaggttcttgaccagagtttcggtggatgtcttgtcaacgccttccttgactgctttctcggaggcccgcgtcaatgcctgcttggtgtctgccagttcacgctgggattgatctagtgctgattgtgtctttgaaactttctcctctagcgctgcgacctgagactcatgtgcatcgttagaggacgtttgggaggcgacctgggcgcggagatttgatatctccaactccatagattcaatagtggctgacttggactcgagctgaagaacaaggtcggctggcggtgactcggttgtagttgtgtttcgatgtgaccgggtctggagttgtgagttctgtcgctgaagagaagcaatctcctccttctatttcgcaggttagcaaatatggctaccacggaaaatacgatatcataccaacgactcaatgcttgcaaccttctcctctgcgtttttcaattgttccctcaacccgacggaatcaacactcgcatcccgcagatcctccacttgctcctcagtcttgcgccagcgcagagttgcttccgagagatccttctccaggcgtttattttccttctcaagctcctcaatcttagtagactgtttgcggaacacttcgtgaaccgactccccgtccccggttagaggcggtaatgattgtgaaggggacttgagcgtagcagaagatggagagggggagacgcttccatgtgagacggaggtcttgcggaatgaagacgagcgcatcttagactggattgacagtgaggcatgtcggccgtggttgccgcgcggtgtatcgagccggactggcagcggctcggcgtctggaccaggagatgtgggcgctggaggcatcggttcagtaggagactcggtgtttgtatcaacggcaagttgcgactttggttcttctaattcctctgcttgttcggaggccgtggcctcgggttgcgcgaccggctcatctttctcctccgcgggggtgtctgcctgcggtgtttctgggctcggggcatcttcagcaggttctgtctctgcggagacctctgcgtccttgggtgtgtcggctccggtggtagtcttcttggccttctttttcttttggagctgggcaacctagagaacaacagtcaagttagcgaccaaaacaacgccatctgtcactcgcggggaattacccttttcttggctgcggccagcttctcggctttgatgcgctccgcgtcgtcggccatgatgaatcttatgaattgtatgagtttattcaaatggaagttgatgagtggaagggagagaatggacagctctccaatgcacggaccacgtgtctgatctatatgcccaaatgagacgtgcaggtacgaactagaggtcgatgcgctagatgattacatagagccactctactattatttctgactggacattagaaggtgagatcaaaaatacaagcctacatagcaatatctaacaaatcctacttccccagctccatactaaccggcaggtatatatatatatagagactcagagcgagtgagtgattttctggtttttctaggttgggttatttcagacaattatccacgaggagttggtaagggtattgatcagagattcagagtcaatacagcttgtttacttgacaagaacgatgtgataggggaaacggccccagagagttgaagcgtggaagagccatttaatgccttttgccatgcgttatggaggaactctgtcaccggaggaccgtcatgtcatctcttgaggttgatcgagatatggtgtggaattacgtatgtcctggtcgtggtggtcaacaaacctaacaacgggcctcctcccgtatttccattgggcgttgcaattaatccacctgtcgccagcgaagcgaggaggggtctggacgcccttagtcttgctcctttggaacaactgacccgagaagagtctgtagggttgacataggatggtgtgatccctgggcttcggtgctggtcatggcatatggatgactgtttactgtcagtgacagcttccaaacgaatatcaggagtcaaaagcaacaaaaaggcttacttcctaacattgataaatctgcataagacagcacaaatccaaaaatagacatagtgatattagagagtaagtcacagaaagttgaggggcagtatgttaataccctctcgtgaacaagaaaccatgcaaggaatcgcgccattcaaacaaagaaagaaacatttacccaacaccgccagctagaaatatcatacccgatcaacggggccataagaagataaacaagaaacgaacaaaagcaaaagcataaagccaagtcattgatatatctagacctccatcgagtccgcaatttcttcactcatcgcgcggactccccgacggttggttggcatattctcctcgtcgtcactgatcacataagtgtcgtagtcatcggtcgtccgaatcgtcttcggagggcggtccatctcatcatcactgtcgctggagataaggttcgatctagcgcgttctccaaaccaaaacttggcacgcttgctagagctgagatccggtgtgaggtatccgtcgtcgtaggtccgcttcccggtaggcgtagtcgccatctcgtctggggtgtggctgagtataggaatcgcgcgtaggaagatgtaacaaacgcgcttgcgaatcgggttgaagaagaagaaatgtagactccagatagctccgtcatcggcatcggaagggtcctcctccggtgaatatgagtagatcgaacactccttgagcgacatgtgttcatctatcgttttccacacccgtgggccccaggcagaagatgatcctgctgtgtatgatccagaaagcgtcgcaggggatgccggtgataagttgatgttctcgcgcggtcgcaggttgagcagcgttgagtcgaccgtgttcatgacgcgtttcaaattccgttcgcgtcggaaatcagtggggcgtaggacgtgtgagaagtcataatccgggtgacttgcgttcagagtagcgatcagataggcaaaggtccgtcgactcgaatggtcgctcaggggtccgaacgggctggaacgcgatagattgagggcctcggcggcatcgtgtgcattaggaggtgaaagtgaagccgaaaaacgaaggaccgattcatattgagcctcgagcgactgttcgatatggttgtagagtttccgatcagagcgtgccgccttggtggtgtaaatatcacagccgccgacgatatggcagtcggtcgtatcgaaatttagagagctcgtcacgtcctcgaagtctggaagtgggaggaactatatcatgagagagtgagtaaactgagagaaagacacgttgggttgcgaccgtgaggcataccttcatcgtgaggttgaaccggggtgtgtatccagataagccgataaggagcttgaaatgacctgtcacagtctgctgttcgaaaagaatgactcaggtctctcttctaaggtctgagagagagataagacgagggaaagtggtgttaccgcaacgggtgattgaaccgaaggtggatatccgatgatgtagatgggcgataacggcaaagagggttgggataagggggacacgaactacactgggcagatcgccagtcttatagcaagtcaacgccaatgtcaaatgaggagtatacaaagagatgatgaagcaagaggggatgggcctatccggggatgatctgagaggggagggattccgaaaacagtcacgtgtgggcaggcgtggcccagtaggaacccgcactgacctcacgagcagtccaaccatggaaagggcaacttcataggccaacaggcccattcaggctaattcacagcccaatctcgtccaaattgcgtgttatgtcttccgaagcctgggggaaacgagttgtattgattagtatggtgaatgtgaaaaactcctatgtacgcccgcaaataaaaaaggagcaagaatcctgcttgctgcgttacatgatcttggtgaccacatcttcctcaacctggggaataattagcccggctgaaacttggccatggctggacaaaggggggggggggataaagagcnnnnnnnnnnnnnnnnnnnnnnnnnnnnnnnnnnnnnnnnnnnnnnnnnnnnnnnnnnnnnnnnnnnnnnnnnnnnnnnnnnnnnnnnnnnnnnnnnnnnnnnnnnnnnnnnnnnnnnnnnnnnnnnnnnnnnnnnnnngtcgggagcagaagggggggggggggggagataaagagcccaaatatagccagcagcaccgttcttggttcttttcgttgaaagtgccaaacaatacccatgaatggaaataaaaagacatcttaactcacctccatatcttccaaactgtcctgctggctgatacagcgaagaacattcttcttgctggtctcctgcatctcccctgcaatcaataactcatcgaggataaagtatgctttctggaagttgaagatgatgtccagctcgcagacattgccgtagtacttgtccatctgctcgacgtagcggtgcaccacctcgagggtgatcagctcattatcggtcgaggcacagccagcgatgaagaagagcgaagcgtagcgacggtaaacgactttcgagtctagtgatggagtccatgttagtccaattccagcttgtcggcgatagggggtaggggtcgggtcgggggtagccacctttgtattccaggaaattgcacatccgcgtccggcgggacagcaccagctgggttacatctttgatgatcttggccttttccttgggggagagagtggtgaaccatttggcgaggcgctagggaaacgttgttagttggggcggcttcggccaggtgttaagtagttgggtcggtgacgaggcataccactttgccctgtcgggagagcagaatcaggtagctaatggcgggtcagcggtcgcaaattgaagctgactgaaggacggtctcactggataggcatattggtggcgttgtgaaatgaagggatggagaaaagtgtcggggcggaagctctggagaaattctttgggtggagcggaggggagttttgccccgctaagccctagcttagcaatttaaacgtgaagattcaatagttcgattcaagatggatagttgtttctgctagaagtcctaatatgctttgtgcgtgtcttgcgcgcggaccttgaatgagtcaacccttgcctgccggagtttctggaaccatcagcttagcaaagctagtatcagagcctcatgtacggatttggagtaaaatagaactgcataatatacggtcgggctattgttatttgtttatatgtgtgcatgctatgcgacctatgtatgttcgcaggtgatctataaaaattgtggatgcaacatacggagaagatgagctcaaaccataactataaggatgtcagagatccatgacttggagaattaagtaaatatttacaactaaataaccagagatgtcaaactatacggacatacggcactgaaagccacgtctaagatcataaagtaaaataagagtcaacgccaggtaaacccttagacgatgaaaaacaaataattattaatgaaataagtagtagcacattaagtatcagaacatccctctcatgatcgagcagagactagagaggcagcgtttccgtcgaatcgttgcaggcatgagagcatgagcatggaagacataaaaccaagaccgagagccctaagctcgtcaaccacctcaaacatataccgatatcgctcaactcacgccattaagcagaaccagaaccatacctatagccatgatccagtatcaattaccaggtagatagattaccgcgacaaggcgagcgatagcaactaagcctcaggccgagtgtaaaccacgcccgctttccatgacaaacgacccatttaaacctgggtcatgttggggcgggcaccgccgcgacggctagtacggcgcgagggaccagcagaggaacgggccatgaaggcggagacaatgacggaggccatgtagccggcccaggcgaaccagaggaaagcaacggaggcctgggcttcacggcaacgcttggtcatgttgtgtgagccattggtgatctcattgttgataaggtactcctagagggagttagcgttcgctctcatgtcttatatttgcaatccattcaagtcaacttacgtggttggtgcaagagtggcactctagcttcgccgcgagcgcgatggcagcgcagaagaagaagatgcagttcagggcgtcgatgatgatcatgatgagggggtggccggaccagtcgatgttgaacgaggctgggaccaggtagaacaacgtgaacatcgagaagaccgatgtatagatggagtagtttacggtcgctgggttgccggcgaaagcttcagcgatcatgttaccgacgagggccatgacgagcagggagaatacaaactgtaatgggtcagtactatattcaacttgggattcttatagcttcaagctttaagcttctagctgtcgcattgcaattgcactcacctcccaggctctgagaccgagctgcacacctctgagacccattttgtagatttagattaggtcgaggttgatttagatccgattgtcgcgttagatcgcgaggaggcaggctggttggaggggtataggatggcgaagtcgagtaaagaataagcctataggtcgattcagcagtatataaaagctctgggaaaacgtcgacgttatgaatcggatgttccggagctcagtgatgacatggaaaagcaacatcttcaaaaccttaaaggtggcgatacgtcatgcatccggcatacagcggcctcattggactcggttgcatgtacagtggtgggatgtcggagatgaaatcatgagtggttgcactctggtcgatgatgagttctcgactagctcaggatttccttgaatgaggcctccattgctgttctttgatccacttgggtttttttttctcacaccagttttgaagattctgctggaagagacggggggattcaggttccatttccagtttgtgggtttcccctcattgacagttacaggcttggcatttctaggaacggcgctgttggacgatgtcgatctttacgattagtggctcgataaggctgagatgattgaattctacgattgaattctaattcgaacaaaaagactgaagattctattcaaataaaaagtaaaagagaaaccataaccctccttggcgttattagcaccacactaaccaagagagttatggaacccttattggtagtttattttactttgacctatataaaagagagagaacacagtgaatctttcaattcgatgccatatctatgttgtacacgctatgaccttacatctttatccgacacaatccccgctaaactactgtctactaccctatatacttttatatagatcttatttaataatttagaatttggtagttcgtcttggtaaaaaacccactttctatgtctccgtgagagtcttcttatagctgctcaatcaacaataaagcttgcttcaatttcccagcgacaacagagtgtccgtttcgtgttgctgctttgattgccgtttccatcatctctccgggtgcaggggcgtcgaaattcacctgatctgtgagtagcacgttcaccatttcaaagtggccacgctccgctgctgcctgcaatgctcttcctctgtcgtatccggacgcaggcaccgcgacttcggcccgggctgcgaggagcctctccccaattttccagtagccgcctatgactgctaattggaaagctcttgccccccagacttcccaggacacacttctcttaacatttgcccgagcttcgagtagtcgttccactatttccaagtgaccaccctccactgctacctcaagagccgaggatattgtttcttgatatccaaaatccgccccagctgcgagtggtttctttactgtttccaagtgaccgtgtgccgctgctccttggagtgctgtttctccgatcatcctatgtgcaggaatatgatgaaccgcctgggctgctaacagtcgctctaatattttcaaatggcctctctttgcagcggctagaagtgctatgcctcccttgtcatgtgtcccaaatgagttgatttcctcggccgccataagcaaccgctcgacaatcttcagatggccaccagctgctgctaaatgtagacatgttttgccgcgtgaagaaatcggtctagcaaaatcggctttctcgctcagtaatcgctccacaattttgagatggccgccacctgctgcagcttctagcaccgaacagtcgtcaagaatagtattcacgtcggctccagctcgaattgaaagattcaatgaaaagatgcaacctgattgagcagcaaaaaacaccccatatttcaagacctcaagggaacttcctcttgcaacgatcaagtgcgtaaagcgaaagcgatatttcataggggagcccttcaagatttcacacatcgcttcctctgtgagactgtgaggttgacgttgcataatgtagaccaacagcgtaagatgcccggaactaatcattgcctgaactgaggttgaattgtggctttgttctttttggtcccgctgcatgggctcccatggtttttgtgccgatatatcatcgtcttccatgcatcggcagaagagcttccatatcttctggtgcactacaggatttatgagcgttgtgtggtagatccaatttgtctcggcatattcatggaactggaattcattgtgttgtaccgggatctgaccgggggatttgaactcattgcgaagcgcttcaattttgttttcaagttctcgagcactaatgccctgcagctgatgacgacgagacagcagtttcagtgctatttggttggtcgcaccattatgactatgtatgcgcgagagaccaagctgaatcgggtttagtcgagtattggagcttttgtcggctctcgtcaactgacgcttgaagtcggaaaaatccaggtaggtcatgcagagaaacccgagatgtcgatcgagtttttctacgtcgaattctcttaagtgtgcgctgttggtggtaaacaggtattgcttgacactttggtgaacgtaatggacagtgtcttcttcttcgtcaatatacaccaagccgcaacagtcgctgaaaacgtgattcatatcgctggggaatttcccatgttcgatggactcttgtccgggagaaagactcagcgcttctcgatactccatgacagtcaaaggttttttgaagacaccgcagtattgcaacaccttgatcgcgttgttattagtctgtcgatcgtaaatccgagatatcctgcgatcaaatatttccaacaagccacgtggaagattgttgagggcatttatgatgtcgttgtcgcaactttgggcgcagaggtcttcgatgaacaaacgagtccagagaaacctgtttaattttcctgtgagcaatggcatatgttatcatttgtggagggcggcgaaaacaatatatatcaaaaaaaactgtttgtggccgtaatctatggaaaatttcaaggggaactaaagaagaaattggaaattggaattgaatgcttcatcacttacatgccattggatccctcccgtaatgccgtggagatcctgattattagaccaggatcccctaatttcagatcttcttcctcgagacagcgaccgagggtagtcgaaatatagtgatctatgtcccgctcgacgtttacacccgtgattgggatagtgaagtcaggtctgaaaaccccgaaaagcttctcttcaagctcgtaccgaccggcgcagatcagcttgaatcttttctcacggcttttacataaccgagctagttctgatgacacctttttgatctcggcgctatcaaattcatccaacccgtcgagaatcaagaaatactgcttcttaccctcaaggtatgaaagaagcaagtcgataacatcttctgtgtccagacagccgctggtatcctcgagctctcggagcttggcattgtcttcaagatcaatttgcgaatctagcaattgacgggcgattgttccaaacaggcttctggccgatagggatgccgtttcctcggcacagcagatgttgtatgagataacatcattgggctcccgtgatctgtatagatatgccactatattggacataagtgtcgtctttcccacacccattttacctgggcaccagagaacggcactatcttgagaatccttccaccgaaagaaggtggtttcctgttgaagccactctgccgtagaagaaacgcgctgccttaaagcctgcttccatggcttcacaaaattgatggttgagagattatctttgatggtggatctcaatttcgagttttctcttttcaacttgttcaggcgccatccgttggcttgtgtgtactccttctgactttgctcatggaagttcaatgcgcgccggcggaagtacctgttcctttgggtttcataatgcagaaggttcctcatttcctcgatcgcctggttcgcggctaatgtaatctctagacgcacatgttttgcggcttgctcgagctgaattaggagtgattggaactcgaattcgaaaggattgaaaatagacgataagatctgggaaaatggagcccgccgcgatatctccattgttctaatgcaaattcgaacaatgatagcataataattgcacaactcgcgctggagaccggtgcatccggggtagagctgaccaaattcctggtattttggacaagacttgccaattgccatgatcatgcttgtaagcttgtcaaaataggacgagatattgcttgctgacaggatagccacttttaaacctccccaaatcagaccggcgatttgaggattagagctgacaaatgtgtccacgatggtagtgaacttctgcgtcgattcgagaaaattatacagctttactgcaacgcttctctttgtcttagtactgttattggcatcaatctccgccacgaatgtaacaacactagaaatgtctggactttggttgctcatatgaaactcttgcttttgctccttcgtgaggacactctcaaatgcctccaacgcttgtgtaagagctgccgtgggatctggtgttccgggatggcgggagagaggcacaagttcagccatgtcgggcaatgagccttatttgggctatctcaaacgttcaaatacttgatcgcttggagatacgcagtatatcctcgtatggtatgggcggacgtgatagagattaaaagaatcaaggagttgggagttattcagcggcctagcattcggcatggggaagcgatagattcgatttggtaacctgcaaatataaggcaggtcaaaaagtcaggggtggctaacgtcgtcagtatcggtgagaggcagcaggcagaaggacacctgattggcccctatgcgcgcctgcagatgcaacaaaattcacagcctcaaagctggctccaatgttcaaccaatcatctcgttgagacttgccattgacgtggcagtgcacaagagtaagcagtttgaatatttggtcgatgagctagctctccataccattaatagatgctgtcaacaaaagagagtcaccatctagtagtgcgtagtgcgcccgagggatattcagcaccattatctgcctaatgatcgatcgtaaggctcccaactatcttacttagcttaacctccatttattctgcgcgttctatagtaccatgggggtcactaagaaatacccggcctgtaaaaataattgacgagaaggtgtggaacaacatttttgaagacggcgtcttcggcgccgggccttcgctattcgctgtagtcggggatgccgtgaagccgtccgtgagacgggtagcttgcctataaggcggacgaagcccttgactaccttcttcagctgacgcttcgtctcaagggcccgtctagagaatcaagaagtcccgtgtttgatgcccttggtaggtgtggttcgtggtactggcttgtgaagaacccaatgcgtgcagaagcaatggctcgaagatgtcttgatgcggattggaatgattatgtctgtggcgtagctggtacgcagttcgaatgagctgccgagtcttgtaagttgttggtcaactttaacagatagttttctttcctttccctgtacttagtatcttggtaatatgcactcgttctcctgaactgaattaatggtatatcacttcctctcagactcactttcaactcacctaaatatatgttcaatctaggtagaaattaggtaaacaaacatggatgttaaagttattagtcaacgcgcgagcctggctgattgcagtggtataaatacccttccatccttaggcttgatcatccttcctcttctcattcacatctcaggatcaagcttcctggggcttactacaagaaatacgttgtctataggcttcctagccagaccagctcaatcttcttttcatttatatccccaggagatgggagaccctagcaagcccaatacctggataaaggacgttcatgatctgccaaacaccgttagtcttgttgggatcatttacgtcctatacctcgtcgggcaggttgtggttaattctatgactcacttccagaagctgaaagatacttgcagagtaagtttaattgatatccctccctatattgagagcagttcgaaggatatcactcagacctgaatactaatagtcactataggaagacggcgaaatataccatggatcccgagagcatatgctacgggctggcatagctgaagtcgccgatatgcggtcattgaagaatacgagagcgaaatggctggatgcgagcaaggtaattactttgcactcgacgtcaaggtcatgccaatttatgagaaggaaaagaacattttcatggctttcctatatcaacccagtcacatggggttctttgctgcagctggtgattcgtcgtcgtctgcaccgagtttgtcaagtcccacttccgatggagcttcgctccgcgagttgacggacttacccaggtcattacggctatcggtcgaacctttgaacgctcatcggggtcacccgatgagctatcctttggagatgatggcgggccggatcgaagggcggaagtgagtgatgcagcagagacggtcaggcaagtccaattccttctgcggtatggtgattatgctggcatggtgtggaatgttctacgtcggatctcgcgactttccgacacgcctctgccagactttgtcgtctcattcgataccgacctcgacgttggtggagaagaccaggatgatggagcattgccaggcgggacccccgcaaactctgatgccactgttaatcgcgattgtacctatgtccggcccgatggaaagtccaatccaatggaggtgtgttgtcttggacgaatcaaagaaggagaatactatcggtaccttaaatggatcatatatgaaactgaaggtcagtattgcaaaagctagagttgagtattatattaatggtataataggacattgacaacaaaccattgacatccgtttcttacaaccgtcctcgccgacggtatttgtacttctgtttcgtacctgaatgcaaagagccgaggaaccagtgacgaaaaaggttaaagccacgcgttatcggccccccgccggcgagtagcaatcggtcaatactggttaaattagcccgttgttttaggatcggaactccgatatgtacgacactgcaagcactgggtgtggaatcgacggcgatcaatctacccaacaacagggaggagattcgaatcgacgagcctatggtaaggtcggcaatcaaggcgtccgcgttgcggaataagctctgccacagcagcaatcttcgaggtaccccccagacatcacagtgcagtacgatggagacctttagaatttagtggcactcgtcgagactcgttccttccctttcgaggtcgtgagtcattcccttccccaaatctccgaagctgactgtacggaccatcattgcgattggtcccggtccagcttcaaccccacaaccttattcctgaaccagacggaaccgaccaatcacgatggttccaccacgaaacgcagcgatcggcaagggtaaacccgcgacagtgctagatcgacatgaggaagaaccggttgatcccgaaacctcaaaccccactggtgtacaggccctcgttgaaagtatcgagcatgatgatgccggagaaggccctttcaatgttcgtgcgatcctcgacgcaactccgaatgatgattgaattctatattctaattgaaaagaatgaagcttctattccgattagagaataagaacaaaaaaagtaaacaaaccctcgactctgacgttattagcacactctaaccaactgagctatggaacccttaacctttgataaaatagtttcttctacttaatctatgtaaaaagatagagaacagactcaggtatagctttcagttctatatgccatacctatactgtatgcgctatagcaccttacaatctttatccgacacaattcggttgtctactatgggatttatattgttatgtcttttttggtgtcttttttggtatatcctatactgctatttggagccttttgatactactattatataacttttttatatagaaagaaagaagaaaaactggtccaatactatggagttaccatggagcatatgcttgtatatagtatctctcttaatgcgatatcacttcctcttactagactcactctaaacttacttcaactcatctaaatatatgtccaatctattcgctgaatatggaactacagaatcgataggataaccccgtctatattcgcactcaatgataatgtaatacggattactatacaatatagaaaccaagcaaacgaacatggatattcaagtcatcagtcaacgcgcgagcctggttgattgcggtggtataaatacccgtccaccctccacccctaggcttcttcggtcatcagctctcatcccttgatccttcatcctgtcattcgtaccttaggatcaagcatcttagggctcacacaaaaaatatgttgactataggcttcctagccagaccatctcagtcttcttttcatttacaccccaggaggcttgatccttcttcttctcattcgcatctcaggatcaagcctcctggggcgtaactgcaacagatctattttctgtggccagtattgggtctacttgaggcttcttagccggacatctcagtcctaattctactttcatatcggttgttacggcctgaaggatcgatgggtcgttcttgcctgtgtgggaagcaaacattccttcctactaagcgagcataagcgagtatatctgcatttgcattgtttgacacgagacgcacaaaaccatctcggctcctcgttggtcttttcttttattctcctttgattgttctttagaatgcactctttgttcaataaggtgcataacctcgcttatctcgtcgacactgtctgtgtctgagagtcaccaccattgtttgcccacaaaggttcctgacaaattctttctttcgctttcatcaccacccatcttccttttttattcaactcaaccatcgataccttcgtctattcgcatctatccttggaccagcgtggctgcgttttaatctttgttccaacctgactacacaccaaagggacaccgtccagatatcaagcggaaacaaacatcgctttctggaatgaccacaactatatggtcttggatatgtggccattgcagggcatgagaacgaaatggctggatgcgagcaaggcaattaatttgcagtcgacgtcaaggtcacgccaatttatgagagtgaaaacaacactttcatggctttcctgaatctaactcaacgcaacaaaccaattgtctttgcgcgcacagcatcgaaaatccaaaagtcacactcattgccttagaaaatctcgatcatttgaatggatagatcaagccagctattggcacgtttgttcgactctttcagatattgaatcgtctcgctcgctagcttatcttgattctagctagcagcacgaaagggccgagagatatttgaaagacgcggacagatgtgccaacaactggcttggtctatccgttcaaacgatcttggctttccagggcaatgagtgtgactttgtgattttcgatgcggcacgcgccaagacggttggctatagcaaacttccgacgctggcatattgcgctagcctctggattgtctaatctaaccatatgtcctaagaatcaatcccgttgcccaagtcccaagctacattcaggggacatgcaagtttgtgagttcgaagcagttgaaaaacgactctcaaaaaactagaaagtcagtcgtttccggatattcctcgggatacacgtgcttatcgtatgcccagttgcgtgctactcgactcgtcgggttctgcgcatggaaggaacggagcatggaccgcactttcatacagaaggaaccgttccctccatactggaacactcatttgcatggtttggcaagatcgcctacaaagctatgcaatcgggacgcaagtaacattactattcatgtgttaaatcttgctctttctactaccggtagtcagtctgctcctggtgagccttctcacgggtaggcgtcctaagttcggcactgctgcattgggtcagaagtgacaaaatcgacatgaccgatgaacctccattttctactgtatctctatctctagaattgaatcaacttgtctaccatatacatactctaagtgcagttatttgatacacaagtatatgccccatggcaactctaactaatgaaggttatgccgatggcatagcatacttagtcgcccgtctacgtagcattattccaaccttggaagtgtttccattgcaatagataagactgcatacttgtatggataaaatcaaagttcaactccagcaactatgctcaaccaccaccagcccacaaccccaacccccactagctctccccaaaggcactttgcacagatccatacctagaaaagtcagtataattcataaatcaaatccacccacaaaactcacccttgaggacactggctacccaacgcaacactaccactacgcatgtagcagaccttagcctcctgacacgcggcagtagtgcacgtaggactcttaacactcttcttcccttggtaagtattatgcaaactaaccagctccacatccttctccatagcctcagtaacccgatgccagaaagtcgcattcaacggtgcgtcctcatcccacgcagctgcggatccgtacgcctcacgggtagaatattcaatctcaaatgtcggacccgtgtgctccagagccgggaattcagacacattgctgtagaaggtgtatgcctcgtagatgttaaagtcgcctgtatcgacttcgtagagacggaatccgctgttgaggtttgtcaggggtgttatgctaggcatgatccagccggtggtgagggcgttatcggcattctgcgcagtcccgttgttggcgtagtataccatgaactggtcttcgtgggtgtgtccgaagaagatgttggcgattacgtgtggcgagtagcggtctacgatctggtagaatagatcggttgggttggggagggggttggttccgtcccagccgctgaggacgtggccgattatccagacgcgctcgccggcgtcttcggctttttgtagttcttcgatcatccaggagaatacgcctgagttgtccgggttggtggtgttgatgaatgttaggaagttggttcggtaccagaagtctgggagagtgagcgggtgaatactaaatatgggatggcaacatacctgtgttgaatgcgagaatgcgcagtccgtagtgcgtcttcacggagtatccgccataatgcgttctcgcttcatcggcggtctcacggctaatccagccttcatggcgccacagtccagccaggtgctcatagttccagctttgttgttctcccagacggccagggaggttgtgaggagagtcgatatttgcaggactggtgtcgtgatttccaagtgccgcaaagacaggaccagagagatagtgcttgaacatatcgttaatactagtctctgtatactgggtcaatgccttggagatctgggatgccggatcatgcgataccaggtcgccagtataaagtgtccatgcaagatgctcgtcgtgttttcctttgccagttccagtcagaggaccaacagcttgcagagcagcaagacccaagtcatatggggtatcgcacatgaaagagccatacgaagaggcagaaagcagcgggctgccttcggaaaggtcgttggagttgtcgctcctacagcagaggctagacgtgcagtttgcttcagaactaacggcataccgggcatcgagatggaagtctgacagatgcagtaccttgacccgctcgccacttgccttgggaacctgggcatctgcaggcttgggcttggggaaaagcttggtcgtgtcaagcgggctggtagttggcgcactacaaaacttgctgctgagagaatggcagatgtattcaccatccaatccttctacatcggcgtatgccagcacctgcgtccagatagcaccaaaggtgtttgtggcgaaatcttgctcgcacgtctcattggcatggaaggcaaaagccttgcacaggctgaccatggcgttcgggacaaaggtcggggcatgcaatgctgcaggcttcgctgcggctagagcgttcttgcatttggtgcaattgtcttctgaactcgacttgatgatgttggtcacattggatagtgcttcttgaaacagcctatacctctttttggcagacatgtgagttcgcggcataggaaagtagacctcatcttgattgtctgggatgttgtcgggatcagtcaactcatagggaaaggtgaggtccaacacaggatcgtagataatcggctggggttgttgggttggctgggccggggaaacatagtaggatcttgcattcacattagcatatgtgcctaagctaccagactatcagtaatcatacgagaatacagaggtcggaaacccagcagcagccacataggacgcgtcaccagggagtgagacagcagcagcaaggttcaagatcagagatgtagtccccagcaaggccagggccatcttggatagacagtgcgccattactgcaggcgaatgaaatacagcagagaagaatgagagataagcaaagaggaaaagaggtatttacatatttacatacttatgtactgttgcgcaacataatcgcaggtccgatgcacgtggtggtctatacctatgggattcatccgtcgcctttcccgtggcgcagagatctacacggcattgcttgattcatcttagttcctggatgtggaattcctctgatttctcttttttgtacctaagccctcatgtagtatactagctagatgctaggcagtcgaagctttactatgttcaattgcaagtcaattgcatattgtacaaatattaaattggtttgagtctgaacacgctatttaggatctaaagtctgggtggatacggcagttttgggccgcgccaaccgtcgggttaaccagctgccatgaatctcaatgtttcttgttaatatatgggaatggattgctatgatacggggttaatataatcagatcctaataaaagactgattctctactatacaccgacaggagcggaattgaaggtaggatcggagcagcatcgtcggtctcaatgactttcgttatacagtatagctaccctctcccacgccttcgctgagtcaatccctcagggcgcttccgaaaaaattccctaggaatgaaatttccatcttcatcctgcgccgtcccatcgccctcatcatagacaggaatccacccatccggggcattcggacacagctcgcacatatgatcgaattggagattcaaatagagaggccacaacgcccagaccagcaccctcatatatccacaatcagaaggcgaatcatacctctttccggggtcataccgtccatcaacgaccccaacaaacccgtcgtcagggtcatcagtcgcaacaagcgagttcaacgatctctcatcaatcacaagacggacagcaaagcgagattcctcgcagtgttcttcctgcttaatctcacgcagatactgagcgaaatggccgcgaacttgctcgataccggcaccgtcccaacgactcgagtcggagatgatcacgtccttgtgggactcttctatcagatgctcggggcgagggtcatccccatagttcaattcaccctttatccatgtagtcatcacgcgggttagcttttccatggcgatcggccacaatttctcagactcgggcgtgtagactgttcgatagatgatatatccccaaggaaaatggcatgggaatcgttgggttaggaatcgatgggtaatgcgatctgccgtgtttctgtagcatggctcttccttccactttgccatggccttttcggtgaagtctggatggtgccagcgttgtggccagaccgggtgatggtagtgtttgttataatctacttccgaggcctggtcgatggggttgaccgaggcagattcagatagggacggagttgaattcatctgtgggaagtgacacaaaataagcgaaaagagggagagaagacaggtagtaaattataggagcaccactttgacaaggataggaccaagggagaggaggttcacgcgcgggtattgatggagaagacctgaaaaagacctgagaaggtttaaataggagatggatatatttgtttgaatatacttaggcctactcatcgaccaataatataaagtcttatgattaatccaaatagtgtaaacgtaaacaatgtagtcttataaactacatggagatagttatagagatgccgggatttgtatgggcccaaaggcttcgcgcaagggactcaaaaccctgccgtaggtggaagtggactttcgtacgtaagaggaaagtgaggttgacaaccctagtataattatattatttcgagcccagtggcttcctatctagcataaactcattgagtggccagtctctcatggactttttctttagatacatgaaaacaatggtatcccaattccaaatcccaccaatcatgccgcgaaggcttaacgtccaagctgttctgtgtgaccactatgatatagggccagcgactgaagatgcatgcacggaacccgatagcgagcggtgggaagcgggtcaactcccagatgatagattaatggtgtatccgtgcgggagagcagcaatagtccgattggctcgagcagactgatacaatctgtcgtgctcatataggacatcaataggaagaacactaccctgttggcattcccaaggaattgggggaagcagaggatgcagatggcgatcagcggatcagtaacacccagagaagagtcgtgggtgtgagaagttgagagccagacaggttgcgtgctgttgagcgcaggctggtgataggatcctggaggcggggtgctcgaagcctgttgagcttgttgacttttggatgtcggaggtgatggactcaattcggcgatgaagagtaattagtgattccaaagcgagcgacaagtatcaattgtaatgccatgtcgctgtacagcatagattggattgccacatttcttcgcgggcgttgaatcaactttgcgcttgttcatcagaacttgctaaggacggcaccgcgggcacagatagataaattgcacgctgatgtattcgccgtgacagtcatggaatgcactgccaaagaaaatggttgcctggaatcttgctcggactgcatttttgtcggaacaccatggcctggcgagcatggacaaagactgcaatttaattatcgagagcgccagagatcaacggcgtagtgtcacccgcccagaaagagaaaagaaaagacccgaggccgatcttcagatcgactccacggccagtctaatcatgggagccactggacgatccactggaaggggcctgtacacagacgagttcaaccataatatcgtttgggttgtctggcggtgcactattataagaaggagcgcgactgatgatgcccacagccacctgggaagcctgcttgtgggcgctcatgtgatcgagataccagacctgccaaggccaagcgcccgagccaggtggcatgatagtaacgttctgaccggggactcgttccctggcgaaatctagaaaagttagaacataacgctaggcagaaaattaatcgacatactttggaccggaatagcggcgacgtcgagagtgggcggcggacacgaagtcagcgtcggcggctggatcaacatgttgttgagaacggcctcgagaggtttggaatagtattcgcccgacacggcaagaagatatatagcattctgcagggcggttttcagatcacgggaacaatcagcgccccagataccgtcgcagccattgttcgcgccagaaggggtgccggtcaaattgccgatcctgagaccgatttcggatgtgcgatttgagtcgacagcactgaggttgatattattattttgatatcccagccaaaacgccgtcttggtcatggggccttcgcccttgccggaggaactggcatcaaagccgtagtagagcgtgacggggtccgggaataaaggtttgaggtcgaagcggattgcggtctgagcgagggagtcgatacagccattattccagaacgagcagaactgagcggagaccgattgtagtaacaccaacagggctagagataggctcaggtggaaagccatgtccaggatatatgtccagcgagagtgaccgcggaggccctcaaagtcaggataatcgagagcagaggtagggcaaggtcattacggggaaaggaggtaataaagggtgggagattaactgataaaaggccgtcaacggaagccagggaaacgggtccccgcaatacctactagggtctgaagagaatgaggctagtgccagtggaaagccccccaaaaaagggtctgattgttatttcggggtcctagggagaacgaacaattggcgctgccggtcgaacttgggaaaaagaaaggaaaagaaagtgccgagcccttgccaaggagaaaaccaaatatacagattgttgcgacttgtatgtattatttcaggtttctcgcattcttgtgagagcgatgtgatgggggataactcgggtacctgctgggtacctgggaggtacctgctgcaccctgtgggtttaggggaccaacaagtctcctggatgtacccccttgattggaaagggaatcttattttcagcgctaaaccagaagtccccgcattgctgtcccaaagaggaagttattggtgtcgatcagccacagggtaaagcagggtccagccacttagatgcgaccgatgcctcacacttggcactgcggtgtattggtattgtattggtattctatcgatcctttccttttctgcgtttaaggtcagatctcccggatttgcatgacctcatgttcattccagacgtttgaattgctagcaagggtattctgtactttgacaataataataacacaacacccaatccatacccggatgagatctgtgcgatatgcacgtcgtgatgcataccagatatgtatgatccttgcctgtgctccgataggctcgacggtaatatagctcctctgacgtaagaaaaaagcctgaaataattggcactcgctgcgtcatttggtttcaacgtctgaaacactctctcattggacgttgcgatctcgggttcgcatgttttcagccagagggttcttggctgactcggctgtgttatcgcgagacaccggagtccacttaatccagtaatcctccgtattcacgttactccgtgctcggggagaaatccctcggaaacaagattaattggaatgccggcttaccttctaactttcaggtatgtatggagtaccaacattctgggcatggaatattcgaaaattcgatacataggaaagataactgattttggattttgagtagggacctagaataggaaaggacagacttttcaaccaacaagccgagcgtatattaggctagggagttcaaaacaatacttctcgaatgtcacacatttcacagcctgcaattcatcgaactcagtccgcgtgatctagcctgtcatcggcggagttaagccacaggtatctctcgacgtcggcgctttgtgcctttttaaattgtcaagtgggtcattcatttgcgagtgagactgagtgccgggcacgccgtacttgtcgatggccttaagaggcaagaggtgtggcatgtcaacaatgcgcgttgtcggtcatcctgtcttgcagcttgatctccatactatactaaacaaacatgaattgacggcaaacgaaagggcgattgaaactttcttctgttagaaattagaaggcccgttgtgtaggtacatatacatacttcaacacttttggcttcaggtcgtatccccgaagcaagtcgcggtgtggtcgcatggaccataagaccgttcggcgaaagtggtattattgacgaatcggaagcgacacactcgatgaccaccagttcgccaagctccatagaatatcacaccggcaggggcgagaaaaaaaatccaaaaatccaagaacacaaagatagaaaattgatgcatattgtacaatgaaccaaatgagcgttaacatgctccccttaacataatgtacatccccgaggctttgccccatgcaaacagttagacatatacaaattcgaagatcaacaatcaaaattggagggagagtttcgatcacatccccacgccagaactccacgcttgaaaccagaatgcaatgattggtagattacccaaaacctgacagtccaaatcagaaatggacgtcaatcatttgtcgttctcaatggaacgatccttgccgtgcagccagacacgcttccagggaccgtcaggtccgaaagctgcctctcggtcttggcgcatgccttccaggacaccaacaacaccgccactgcgcagacgctcaaggacaatgtgcatgccctgcttgctcttcaatacggcctccttagtccgactcacaccgatgagctcaatagtccgctggatgccggcagtggaaaaggacgcgaagaatcccttgcgaggctcttcctcttcatggtccccagtgtcctgcttctttttcccgagcagcttgccctgaccgagtcgggagcggaaggtaaccgtagtcttgacatgagtctgttcgcttttgtcgagaccatcgagggccaggcggtcttcctgggacaggagtcgcttgtagcattgcttctcgaccacgctcaggatgcccgtccactccatgttgcgggactcggtctccatccacccctccttggcgtcaacagtggtcttctcaaggatatagctctggccggaactgtctgagccgcccatgccttttggcagaagctttagaattccagaggggatcttggactttttgaggtgtagtcggatggtgtgcagacgctcggtcttggggtcgacgtatcggtcaatgacatcggtggtgagaacatggcgggaataagggttaggatagcggaggaagtaggcgagggacacggcggggaaggagtagtcgtaggtgaaattgttttcgaaaaacttcatgatggcattcggtgattcatgtagatggattgaggagaaagagcaaggagtcgtctgatccagcactttttgcctgggcgagcaaaggtagaagtggggatccaaggggattaatagttattccggggaatcagatgctaaagatcacatgcatctcacgtggtccggggattaggcctatcatcggcccgcaatagctaaacgatgtagaccactctttttgtccaattgaagccaagctgatcaattgactctaagataaatatgaatactgaaggaggattctgcataagtatggatccaatacagtcaagtccgacacagattctatactccatgtacataaaggaggtcacgtgccctctgaaatcaacatccaatcacccaaagtagcggtcaagaacaaactagaacccaacttatgatactacgagctatgacgggctatcaacgaggcttctcaagatccatacatgaacagtagagagacacaccaaacaggaaaccgggttaggctctcggatagacacgtttccgcgcaatctcacgtgatatcaatgtttcacccgttacccggatgtgtattgcaagcccctttataggccaacacatcccaggctaggcagaggcttaaatcgcgaatcgaattcgaggctcattcaatacaacgcagaaatggtccagtttcatgattgatcttcatcctctacctttataaacatgcatacaactaccgatcccgtccagactatggagactcgtatccgtatcaacattaccgctcggcaacgccaactgccatgagtggtccgatgtcctcaaggcaaaccgtacctcagaaaaggcgccctcccgagccgactctcgaggtcaaaagtggactccaccgtgtccaatatgaacggagaacgggtagaaggcctcccgtcgccaaaatggacaaatatttaaacgaggtcttcaatctcactcgagattcactcacttttattcctatctatcatagtcctccctcacaatgtccgaacaaatcctcgcaggaaagacatgcctcgtcaccggtggcggcggcggcctaggcaaagcaatcgcaacgcacttcctcgaagccggcgccaacgtcgtaatctgcgatgtgaacgaggaacgtctgcaagcgacctcagccgaactctcccccaagggtcccctgaaggccatcaagacggatatcacccagaccagcgaagtggagagcctgtttgagacgctgattggcgaatacggcaaaatcgacgtcctcgtcaacaacgccggcatcatggaccacttcgacccgatcggcgatctggacatggagctttgggatcgcgtcttggcgattaatctcactgccccggctctgctgagcaaattggctgttcggaacatgctggcgcagccgaagccggatgggcgcattattaatattgtttctgttgctgggaaggctggatgggctagtggtatgctctgaggtctctactggatgatgatctgagattgactttatttaggtgctgcctacacggctagcaagcacggtctggtcggattgaccaagagcacggctgcgtactatggcaacaagggcatcaagtgcaatgctttgatgatgggcggcatggaaaccaacatcgcggatgcgtttagcaagggaatgcatatggggggctatgagaagatgatcggtgtcctcaatgccatccaagctcctcccgtcgacgtgaatgaggttgcagggttctgtgtgaacatgacatatggaaagggcgccggccagatcaacggcgcgaccatcgctattgataacggctggacttccatcgtcgggtagactacgactatataggcatgttcttctcctaatagtgtatatatgacatacatacatccatccatcaacagctcgaaaaaaccaaatcaattcaaaacacctcccatcacctagaactaagtaaccaacggattcggcttcggcggctcctgttcccacctctccacaccatcgggaatatcaacaacagcatgctgacaccaaatatgcacagccgtcctcatcatccccctatccaaatcctccaaacagccccccttaacattcgtaatcgccgaaaacgccggctgttcgcccggcgcaggcaccgcatcccggaagcgatgcaaaagccgcgcgccacaccccctgcagaaaagacactccaattcgcgccccttgagcgtgacgcgcgtgtagctgtccaccagacccgacgcggactccgggagctcgaagtacgggaatgtggcggtgatgccgaatgcggaggagctttggtgctggcattcggtgcagtggcagatccagagttttaggggtttgtcggttggcgtggtgaattggatctggccgcattggcagcgcgctttcattcccatcgtggtgggtgggatgcgactggtctagttaggtgaggggcagatatgggttttggggacggagttacccgtcaagtttacgggtggcgcgggtgggactgcaacgttgtacgggttgacatatcggaaggcttgggttggtatgttgttgaattagtgttatttcaatatacggccttgttattattgtgaatctgattatcgaagtcttacgtcgttgacggctatataagcacccactattcttgtagatgtagttaggtttcttcgtagaagaactaggattactacctacaatcaatgaagttttttctaccaatccacgttatgtaacctcaatttcattgaagggattatcccgagtattcattctgtagtgtagaaacaacctcgatcttaaatgtcaaacttaacccgtgtaatgctcaaaacccgctttcatcatcctcgcatctaattaaccttgaaatatctctttgacggaaacttcaaagtttaccctcactgcacttcttgataatagcaatagccccgggagcctcgtcccaagcttcatatgtaaaattcaaagccatctgcatctgttcgacgctcccgaccgaaaacctcataggcttagcgtccaaatgcttacctgggttcatcagggccggccagaaatgtgcgttcaatttgtggacatcgttgtacaaagcgcgaatttgcgcctttagtctcccgatttccacgcgcttgtcgcaagtgatgatattggggttattgctgatagtcgacggacagaagccgagttccggcatgtgcgtcataccatccggacgtcccatgtcttccaggagcccctgcagcacctgcaacaccttgaccttgactaaagtcacggccacgagatggggcagatcaatccacctgccgcagaagatatcgacgggctcgagcggattggcgttcctgacgtccaggtacggcagggtattgttaccccagtcatagtcgtcctgctggccggtggtcgcccaccacttcaggaaatcgtagcactcctggtcctgctggaggcggatcattaggctggggatgacgtcccgcgagcccatgttgtcgcctcgggagagatacagattgtctatcaggatgttgagctgtttctggagcgactcgacatggttaacggcggtcatggtatctgaaagagcagcgcggtagcgcatgtaagggcgggtctcgtggatcttccagaaatggccgatgccgtaggtaaagatattatcggggtggtcccgtaggacccgttcttcattctccatagtaatgcgacatctgcggattgcgctacacgcggacttgtgcttccggcggtgcgcggtctggtgttcgacgctgcagtagagcatcactctgcagccggagcagcggagaactctatcatccttgccgcatacaccacagcccgaggggagtggcattttcttcctagccgctgcagaagagggggataagagcagttcggtgtaggggccggtaaagggtttccagctctgtgaatgaagaccggaatgcttagggtgtaaatgagaaagggcgcagagggaagtattgggcgatgggaaatggaggaggtgttaggttatttattctggacattctttaggagttgataatgcctgtctgccttcaaagccaggccacaatatagttaggcgataacgtaccccaccagggcaaaacacagagcaaacgcgctaatttgcaatttgatatctcaacggttgtttgaatggtgtgatccttgcaatctcatttttatattacctctcgtcagctgagtgcgtttcaggaaagttaatatcacagcgactgggtagagtggagtagaccacaatgaagcttttactatagactactctaaatgcttatccatgtcgacgagcaatgaaatcaaagcgacatatggttaagatatagtattgcatttcctgtgctctcgattttacatctgctgatatccatggatggacgtgagacatgcggcatcgttgctatccactattccaagaatagctcgcacgaagcatagacgtttaatatgaaaaccctacctagactagcatctttcccatctagccctttgacaaagtacaccaccttcgcattccttcacattccttcacttccagttcctgtgccaacgcctttggccagcagtccaaaaccttatcgcactggtttcttgccactgacagcattactgcattacttcattgtgctcacaggcgcatgtgcatacatatgcagggaaacaatagtccaaaccttgcctctaaacacacagcacccagttcaaggacgagcagaaccgatataatcacaccaacggtcacgcttcgaagaaaaaaaaaagtcgaagatcgacggatcaccctgtggcagggccgcgcaaatccaactggcggtctgaatccacgacctccccccactcctggcgtcgtcaaatcagctgacagcctcaacccaccagccacactagatcagcactagtatccgtatcggtgtgcatcggacacgttcgatgtgaaaggcggtcggacggagactgagcttattaaaccgatactgctgattaatgtgattatcaacgaggttagggctctcattggtcgcggacaggagcattgtaaagtttgtcgacgattaggtttctcagtctggagtttcgggcccgagggctgcggggagactgccgagaagtatatgcggtagacaacataacatgcggtatggacttggccaagtgaatccttgtcgtggcgatggggcaggtagtggggggatggccttagccccggtctagtgttgtagagatttcatcgtcgaatgttatatcaagagaacagtcctgggctagacttcattcctatagtagaaatgtaccagactctttaactctcatcttcataacaagcttgatcatgttctatttcttgctaggcagtgcggtggcctataacctagtcatggttatctaccggcttcatttccacaagctcagtaggttcccggggcctcgtctcgcggccgcaagcgggctgtacgagatctacttttcggtctggggtccgggcattttcgaccacgagattgacctcatgcaccggaagtttggtacgctgtgtctggtatctccggggaaagatattggatctgatactttctaggtccggttgttcgtattactcccgatgaaatccacatccaagagccttccagctattccgacggttggatcaaaggtacggaggaggtggaacctggctaccaaggacgcagcgtccatagtttccagtacaagagaccgtctatcgcccgggtgcgatctctactttgggcgaaagtcaatgatatgatcaaccccttgatcgagaaacaccatgtggatagaatgcttagcgcaaggcctcgactatttcttatctgtccttggagtaagaagaaagttcagtcaattggagaaagcgaaagtgaagacggaggagctcgttctttgcagtgttaagtttgactccaactcttggacatctcaattctccgagtcgcatccgacgtctggttggaggtggagtcgaccaattgattccattgcatagtggaagatctgagagttgagctcgcacacggttaaccccgcgagattgtggagtttggcctttcttggctctccgtcgaggcgaatggacggcagttcccaccaacggccatgtttccatccacaatccggcatataccacaattcggggtttgtcggggttaaaaaaaaacacaaagaacaagaggcaattccggaagaaggccaagaaaagatccaaaggacaacgaaagcctttttttcgagctgaacgtcttggaagagccccgcttcggcgattctgccatttttaaagaaaaaaacgccagcaagccacttggtcaattcctctccattttattctcatctcctctctgcactgcacatacatctctgcacatacatcctacacctattaaatcatcatggtatgttgccgaacttcctgactccagaacaccgaagaccctgcagatcccaagaagctaacaaacatcaacagcctcacgccgactcctcctatttcactcccggcagctccaaggccgaaatatacgaacagctcctgctgtccacacaaggtctcctagacggccaacggaattgggttaggtgagtcagctccaacaaccctcgaaaccttgcaacctctaacaaccaacagcaacctctccaacgtcgcctccctcctctggcacgcctacggctccctcccagccccctcctcagccgtcaactgggccggcttctacatccgcgacgacaaattccccgccctcgcctcgcccgtctcctcgccgcccttaccaggcgcacccgggtacggcggcgtcatcatctcaactacatactcctgctcgggcgaccagatcctgctcctcgggccgttccagggaaagcccgcgtgccaggagatcaagttcgggaagggcgtttgcggcacggcggctgcgaagcaggagactgttatcgtgcctgatgtgctgactttcccggggcatattgcgtgcgatgcggagagtcggagtgagattgtggtgccgattttggtgaatggtgaggttagtactttttccacttcctggtggggttgggcacaagcgggttttgggcaataatatatatactaacgttctcattttagacggtcgctattattgatatcgactgcactgagccttctgggtttgatgatgtggataaggagtacttggagaaattggcggctttgctggctgagcactgcgattggtaaaagttaacataatttggtttttataatggttacgacagatacggacttgggtgaatgatattgtacgttttatgatcgtgatttcttcctacgtagattctgcaacatgctctgctgtagtttactccttcctttaaaatgtacggagttgatatcttccgtgtatctttacattgacagtatggaatagggattgaaagtcctgctgtattgtattgtatgcgcaagtttattcgtcgcgaggattgaaaatgtaatgcaaaccagcaagccgaaatataaaacgatactcgacctgctcgagatatgtcggaaacaatagatacaatgcagaccaaacaccgagcgaactcatcacgctgggtggagaaatgaaaagagaaaacgccaagaccgagacggtaagaaggtatagagcacaaggaaatcgaaaatcgctaacatgcacaagaacatcacatattgagcaagctcatttgccgacgcatgggactcggcgacagagcatccccgtcttcgctgggaccgatgccgctgtctggaccagcaagcacggtgtccatgtcgatgtcccactgttcgtcttcattgggatcagtgttcacttccgcctcggcttcgccgccatcccagctcttctggaccgcgccgcgcgtgttccagcgcagagcacgctggacgctgatgaaccactcgttgttgttggacacgacggtcgggaatgggtactggctggcttcgacagtgacgtagtcgccctggcggagttcgacacggcccttgccgtcaaaggagcagtaagcggtggatcgggaggatttagggacggcaatgcggagaaggtgggagtcggagagaaccattgggcggaaggagagggtgtgtgggcatattggggtgagaaggatgcccgggatggatggatgcataagagatccgccggcggacagagaatatgccgtggaaccagtcggcgtcgagaagatacagccgtctgcttggacgactgttagcagctcgtcgtcggcgtagagctccaggttcgacacgtagggggacgggccgcggtcgatgacgagctcgttcagtacttcgaattgctcgccctcttcgacagcgcccagctctgctcccttgctccggtctttccgatatacggtgcatgtgaaccgcatgcgcagattgacgcgcatacccacctcgcccataacggcattgagctgcgatttgtaatcggcaaactcgaaatttgtgaggaagcccaggctgcccagcgaaaagcagagcacgggcggaaccacgcgctggaagagccacgatgtgaaaagaacggtaccatcaccaccaagggtcagcaccaagtcgaacttatcgggcgatgtccagcacagatccggtgtccagaaatgtaacatctgcgcaaacatcgggtctttctgcaacagccccggggcatcaaatcgcttcgaattgcgcagcttcgcatctacatagacattgactcctagttcacttccgtatcttgcggtcgaaagtagccactccgcaacttcccgggtcaagagcaccaggctgttatcacgcgccttagtaacaatcatgacatttcgcaccgctcgcttgataggtcgtcgctgtagttgcttcgacacttcacgaacaccagtcgctgtctgaaccagtcgcgaatgcgacagccactcgtcgtcggcgatttcctccaacaccttttttatgttgacagcatcatcgaagcgttggtgaaaataacatggcgattgcagtatcagacgcgccgcggcaggtgaacgatcgagatatccgctcaattgaaaattcgatagcgcagtcgagatgttctggggggagtcattgctcccccgccgtggtcggttctccgaaggcggggaagtctgagcggatttattcgcgagcatactcgacacagaaccggacatatcggtattattggtgataatcgtagcccgcgaggccagggctttcaaaattgtctgtcgcggtatgcagtcggtggacaacgctttcttcgatcgccggctagtcgacttccgaaactgctgtagtgttgagtaaggcagcgacaaggcggcttcctgaaccgattcggatacgtgtataggtagcacgttgtcgggtccagggagatctggcttggtctgggacaaggattctatgctgagggcatctcggaggagcgccggtctgggtggggacgatagagaggggggagacgttcgcgctgtagacagactcgggagtgtgtcagaccgtagatgatcacggctggacgccatcggcttatgcggcaggtaaataagatgggataatcaggaaaagtgctcggatgtaacggggtttgcggatccgaagtcttgagatgctgtcccccgtcagtcgtggacccaggtattgcttctagcgtattccacactcttttttgggttttttcaggggggattccttttcttatttggtataataacgacaaggatgatggactggagtgggttgggattagggtagagattgacaagaattgggattggcaaggcacatccaagaaaaatgggattcctgtttaggaagaccacggacctcgatcatcacattaaaacacgagattatttagattgcttcctgcgattcccagattccccagataatcctctcactggcgagtctactagtcatcgccaaatccgtacaggcgcgcagtgcgcgcagataatgacgtttacactgtcatatcaatctatcggcaataggaggctcgttaggatgctcatagatcatgataggtattttatttctttggatcttccattctccgtgctactttgtgcattctttgccagaatgtcggttaaacatgtattcctcaaccccgactcgaagtgggcatagccatcattctgactgcgcctgggagtctgtggttctgtcaccgctaaatcacttggcaagtgagtgaccaaacgtcatcaaaagcagacagggtccggaatccaacaattgaggaacccgagaacaagcctcacgcaaggctgtcgcctgtggcagtgaatgaagcgtgttgtacatgcagcggcagtcaggtgacggtgccttaaccgggtggtactctatccactgttttgtggcaccgtcgtatcctagtcgagaggggcgatatagcgagtgctgggaagtcatgtgcacaagagaaggggcccaggggtgaccgcgaccttacacacgtctcactaactctccgcaaatttgccgggcgcaatccacctcagatagaatccagcttgtaggcgtagtcgctgtagatctggtcctccacggtctcccggatgaaaccgctcacactggcgctggccgttccttcacccatggcaacgtcgccatcagcgctggcggtggtctcgccctggcaaatggagagcgcgcgctcacggacatattcccaggtatcaaatccaaaccgaccctcgctttcgttgaggagaaggtggttcttcgaggagaaggcaaaaacgtggagggacacagcagccttggcggcagtcggagaggggtcccgcacaatatcaccatcctcagttacaccaaggagggtcgcggagaaagtcatcgacagaggaaccgaggcggagatcatagcgagcaagccagtatgtaggagagccgggaggatagtaaggtactagatagatcagtctgacagttcaacaagcagggcgaatggaatctgagatactcacattgtcaccgcgtgccacgttctctcctccaacaatagccagagtaatgaccacgccgcgacggggaaagcccttctcccgtccaaggacgattttccctagcacagaccgcaggattccttcgatatatctttcaccgacgccaccagttgtcgtaccaggtttgacaaagacctccacagtggcttcctcgggcttcaatgcgtcacggcgtgctgggagctcaatgggcccgttgacagcgcccagaatgctgtaaccggtggctgggcatttgtatgacgccgaaccatcggaacgatgtaattgtgagagggatgctatcggaccgaccatattgacgatggacagatagaaagatagaaaattaggaagccaaagttgtgtttgaagagcaaagtagcaaagttgttctgccactgcgatttttcatgtgcgggccgcttcttgattggccgccttagctgcgattgtacttggtactttgtttgtcgctggaccatgatatatttctgaggtatcgactactttgaggtgtcaactaaattgttgctttctttcccttatccctactattcttactattcacctccagactacagatccatttgatccgtcaagtggtctgagacttattggagtttcaatcaacctctcgaagataaccatgtcttctcatacgagcacttactactgtccaccatgacaaccaaatatgtgctgtgggtaaaccaacggaaattgctcttcatgttctagcttcgtgcttttgatttttgaaagacattgtgagcaaaaggcaacttcaatcgcatacagaatatccattgattctgccatcacaaggatgaccgttgtctatacaattcacaacatagaatcagaggtacaccattattcctcatctcgatattgatgaaacagaaaaccaaacccacgagacacggccgatcggatggcgggcaaggactttgcgtgctatgcatagtatacaagatacctctggccgatgatgagtcttgaatatccccgcgaagtcctgcgtaaccaggcctacgatttgagggcctcgccttgatatcgttttagcagaactactcatttgatccccgtacagtcttaaggagctcatctgacccattcccattcggagtgtccctattacttcccaggctccagagcatccacctccctttctaccattgggcagttgttagttccttctcgattgccaggatctggtaagaattgtaggctcctgatccttccaggatgtattcgtgatgaacctgtagccaccgcgtagaatttgggccagtagaccgtccatatcctcctgtttttgcgcctcggaggtaggttccgaccccttcctgggtgatactttgtcgggcagcctcctgacggatcgcctctttctcaaatttctcgagatgaatctataagggtccgtttgtcagatgtaatttgtactggaggtcgaaccggtacgcctgattgcgagctcgctcctcctcttcgcgtgcggaccgaggcagtagccgtgagcgtttgatgtgcttatggacctttcctttaggtgagatcgatggagttggtccctctatatcaggatgaaccgatccggcgcgatagcaaccgatcctgtctcattacggaaaatggtgtcaatgatttacctgctctcaaaagggctgatgttggtattgctatgcgcaaaatagaggctgccggtatggttttgacgatctgagataccaaatccttctcggtcttccacctcctatgcattgggaggggccttactctagaggatgctgagatgcgggcaagattggtaattcttaagcgtctatcacttagtactaacgcgagcatggaactgaagtgatctaggaatattttggctaactatctaacaccaagttggtcatgaattgctacctgtaaggcgttcaacgtgctcttcttattcattcattttctcgtctatatctatttttccagcatgaaatcatttcatatatctttaactagcatgtagtttcgccggggcttaatatgtcataccctaaaatgaaatgaacatggcaataaatctaatgacatctgagaagtctttaggcagtccacgttcaatgtcaactactaagcaggtcatcgtgctaggcacctacatagccccggagtgcgtgtccatttatagcttgccaatgatttactgatcaacctattcttactctcgaatcccagtccgtctatcccgtcaaggacaccaattatctctccaggtatcagacaaggctacgtatgttttatgtctccacgcatgttttttccctaaacctaatgcagacacagtaatccaattggccatcggcctgacctcggggagctaccccagttgccgatgtcaatatcaactatcaacctggagtggggtaaagaccgttatgaagaatttacgtttagtcaacgttaaatgatcagttttgatctgcttcccgagatgtgtttgaacaaaggttcgatttagaatcatcgcaattggtttggaactagtctgagctggcaagagaacagttggaagtgggatttgatgcgaggatgctaggggccccctgtacgaaacgcaggaggatggctcgattggtaattagatttgagataacgaaggaggggcaggtgacaagtgggcaattcaaggctgttttaggaagattctacattgacaatgtcaatttcaactaatgttaatgggaacatacgacttggatgcagggataaatcaaactcgattcaacaatgtgggaataataaccatggcttcgtgtttctctaatcatccggtagacatctagtagtgtcttattcaaggggtctcggagacattgtagaccagcttctcgccgctgaccttgccctccttgagcagctttagaccctcgatcacacccttcagtccatgctcgccgaccttggtggggtgggccttaatctttccttgggcgagcagatcctcgacaatgggaatgaacttctcagcgtgagccttgtcctccggcttggcagggatgggcgtatcaccgaaagagaatgcctcgccgatagtggtataagccagggtgtagcggtcgttcacattggcacggttaatcttgacgctcagcaaagagctgtactcgccgccatcggtagagatagcattgtcgcaaaacgcagcgctggagtcgagcgagatacagtcaaacacgagcttcaggttgttatcagtatccttgcgaattttagcgggggcttgcgggtccttgtagtcatagacatcatcggcgcctaggctgcggaccaaatcgaagtggtgcggcgagcaagtggtcaggaccttgtagcccgacagcttggcaaactggatagccagggtaccggtcgcggtggagccgccgtagatcagaatgggagtggcatccttgatggggtcggtgggaagggcaagcttcagactctggtacaggccctggcccacggtgttgatgcccacaccgagggtggcggcctcttggaagctgatattctcgggtatcttccactgcaagtcgcccttggcgacgatgtactcggcgaaagtgccgtcctcgggctgcactgcattggagccgtgcacgaagccacatacgcggtcaccctttttgaaatcctttttgacatccttgcccacggcctcaacggtgcctgaatagtcgcatccgacgagaacaccgggaggagaaaggtaggcaacgtgcttccagtcggtggggttcaagcccacactgacggtcttgacgagtagatagtcatcgcgaagcttggggatgggtcgatcagtgaccagaccctcggtcttgggctgagcgatgatgactgccttcatgatgggtagttgattgcggagcgaagcgaagcaattatatagaatgcagttgagaagagggaatttggagaattgggaggatatagagtgtgtgttagttaaatagtgctctgattataaatgctctgattacaaacctgaagtatgacgaaaggcaatcactgatcgtcacaaatattgtaccgactccgtctcagtctatccgccatcctctctacacagcccttggtgaacagcgttgcccctggaacagttcattgttttattgttgtgccacacatgccagatcaagacgctacacagcttttacgggagaacccccatgaaattgggcatctttcgattcaggcctttgatactctgccttggttcagtctcttgaccggtcttcgatattgcacagggatcattgacatgaacacgagtcgtgcagccaagattggacgcattcagggtgttcatattgcgtcatccattccctaaaacgaaggatggctttggcatatatgaaagaaacatgtatataccgtagcccaatggtctattcttgatagaggaatggtcgactttttaatataatatttgcaccaataggcacattcaacgagcttgctatcaaaatcggttaactgcaatccgatttaggaatcaagtgccagaaagacatataccaggcattgatagatgaagcagaccgagagacaaactaccagccgatgaagaccatatcttccagtctctcgagattttatattgagatgtctgacgccagtataagtatgaggtaatgaggttcgctagctagcgcaaggggtatcagccaagaccacgagcaaaaacagggttcacgcaatttgagaaaaaccatcagacgtatatatagctattcgagtccaaaccaacggattcgccgtcttcgaatctccattcaggacaagacgtcgggggttgggatatcgcggggtcagaccgtcaaagtcggttagtgtacgttagtgcttatctgcatagacgacccctcctcgacagaattcctcccagacttctatttcaacttcaagaagaagacaatcatgaaggttctctgtctccacggaaaagggaccagtggcgctatcttccgctcccagatctgttagctcccccgcagtcccaaaccaactctccaactaaccgcgcccagccacgttccgctccaaactccccaatgacatccaatttgatttcatcgatggcccatttaagagtgacccggcggcaggcatagatatcttctacagtccgccgtactactccttctgggaaaatgatagcgtcgaatccgtccgagcctcctacaactggctgactgagcacatcgccaagaacggcccatacgatctagcgctcatgttctcgcagggctgcgtgctaggctccagtgctctcctcttccaccaggaagaaacaccgcatctcccgccccccccccaccccgcggggggggttnnnnnnnnnnnnnnnnnnnnnnnnnnnnnnnnnnnnnnnnnnnnnnnnnnnnnnnnnnnnnnnnnnnnnnnnnnnnnnnnnnnnnnnnnnnnnnnnnnnnnnnnnnnnnnnnnnnnnnnnnnnnnnnnnnnnnnnnnnnnnnnnnnnnnnnnnnnnnnnnnnnnnnnnnnnnnnnnnnnnnnnnnccccccgccctttgaaggggggggtttttatctgcggtggcgcctcgttgagcgtgctggaggagatgggcttccatgtttcggccgaggcgcgcgatcgggatcttgcatcccgggctgcgctggctcaacaggcgggctcgtcggcgctcttggctcagggtgcggatcgctggactgggcttcagacggtaaacggcgggctctcggaggatgaagtgcggaaggagattactagtccctaccgcattaatattcccacggtgcatatttacggctcgaaggatccgcgctgggcggctggtgtgcacctttccggtatctgcgaaccgacgaaacgtcgcacctatgatcatggtggtggacatgaaattcctcggacggctgctgtgagtaactcgatcgcggaacttttcaagtgggctgctgcacaaagtgaaagtggaattcagtgaggagtgaattatattatgtcacactttatttttttcaatagatgagatagattataagtggaaatgtaaagttcggcaaattgtattctctcgagaggtagcgtgggcttgaactaagatatgagagggcagagagatcgacaagacccaatatttggctccacttgccagccttggtattcccttgcctcgtgtatatatgtactcatcatatccatctccaacactccctattaatagattcaactcgatcggtaagagatttccaaggttagccctaattcagccacgctagccaattccggcccactcgaaatttcaccctctgcccatattccgcaaaagaaaacgaattgccaatatccatcatgtcatgggatgaaacgctcaagctcacgcaggccgatgagtccgaggagttcaagttgttcgaggcggttgtcaacggggatgtcacggtcgaggatgccgtgcaatgggtcatcaccacgacaatggacagactggaagactacgggccgggaggaagcatcgagaaagccgacgccgtaacgttcatagctatcatcgagctggctatgcaaatcgatacaacccagtatggaccgctggttgagttcctgggagaattgaagctgtacaacgccgttgattcgtcaacgggcttgatcctaaaaacacaagatggaagcagagtctggtcacatctgccgtcgctgaacttctgggtcgccgaaatatggacagaccggatgacacgtaagcgaaagcgaaagcgaaactgtttctgtacttttcttctgtagtgctgacctgtcgattcgcagaaatctgtgacccggatatggaacccgatcagcagatcagatgggcgaagctcaatatcttcctcgcgcaagtgacgcaggcggctgaggttgagtatacttccctgcaggtgtcgatcagcgatgctatggatgtatcgcacatggcactctgtggactgcgtcatgtgttcgaagagcgcattccttctgaacatattgcctcgacggcgggtctgctcggtgtgtgctactggctaatctgtgccggtgatagactctgggagaatgtactcaacggccgcaaatacaacagatatgatggtcgaccgggagaattgtattcagatcgcgggtggaagggctttgaacgcgaaagatgggatatatgggtgcagggtcttcgtgacgcgaaggccgcttgcagaccgggcaaggaactcgtggaagatttgatagaccgggctctgtccaaaatagagcgtgtaatgagtaatgaaataccatctaaataagcatttacaaactactacgttgtaataatttacacgtcggtttcgaaaacaaacattcaaaccggtttatgaccgactcttaaacctcacagggtattgattagagttcaaacattatatatagaaagacgccaaacacaagctatctagaaacacaagtcactaccatgaaaaagtctcttcaaacagatcaaccgtcttctccccttgtacattcctaacagcctcccgcacactatcacccaggccaccaggaccgcaaacgctaaccgccatcgcaccgatctggtcttctttttctttctctagcacggattgcatacacggcttaccgtggtggatgctgaccggcacgccaggcggagcacattgcatccacagcgaatctggctgagggacatattcctcgacagcatccttgtgtgatgtgatgtggaggctgatggacaggaggaggcgtgggaattggaagaaggagtgcccgttcgagtttattgggcttagggattcgtgccctagtatttcggccatgaatgtttggatccatgtgagatggtctttccatatgttagtgggcgattatttatgtggaacaggtgggcctgatcataccgagactgcggacgatccagactagatgcactttgcgggtagctgtcttttgctccgtgaacgtggcgataacttcattcaaatatgacatcgggtgggtaataccgattcctccggctatcaataggagagtaccgtatgaggtgagagaatggataccacctgtgagatgttaaacatgtttcaaatatcaacaaccaatgggtaggaatccataccaaatggcccctccgccaacgccatagcctgaatccgtccctccgcggaggcttctgccttctggagcaactttttcgtgaatccgtcttgacccttgattagaacagacatggttgtcgtcgccgaggctccagtaagagcatccatagagccacccgagccgcgcttctcgttcgtattcaacgaacccgttgacgaccacgcaaccgtaaagggatgcgaagtccacaagcccagacacggcatgtagaggtacatatactgcccaggccggaaacgccatgcgcgagccacggccacatcaacacgagcaactgacccagacagaacctcgacggtagcagttgtaggacgcgagctgagatttctccaaagcaatatcccaagtcgacctgcacgatccagaccccacaggatcaaggtgcaaagcagcacacgctgttgcagtaggttttgcaggtgataccagagcgccacgaaggaaaatacagccagggctatgtgcaggtgaagaaatagttcgtaaaaagcatgtcgggccggcgacagagattgaacgaaaataaaaaggaatccaatgatggcctacggagatatatgttagatggccatgtgaagtgctggtgggctgcatcacataccagaaggccgcatataaaaagcttcttctgccaaataacatatagaacatagtccgtgccatctgagttcaaggtttcatgttagcgaatgatagccgtatatgtgcaaggccactcacgtgtagaagccttgtcagccaacacggcgctcatgtggatgacggcgttggctgtgatcacccgtcccacccaacgatgcatgaaattaaacgtatcgaacgagatccccaacagctggactaaaggattgttgcgtcctgcgcctaggaccaagcccggcgtattcatgacggccagatggcccgcggcgtacttaagctggaacatcttcttggagtaatcactgagccaccaatcgactgtcacaagaatgaagattatgttcaagctgatatagatcagcaagcaaatcacttccaatcgtagcggaagagatcccatatgaagcctcaagaagcggaattcgcgactatggcgattgccccatatcggggcatacagcagatgccttttcagggccgccttgaaccgacttgtccggcacagctgtgtctggtcgcttccttgccgtgcagcctttgatcgtcgacgatggctgatgcgaatgacagtcttccagacgaataaaaaagctatcagtccgccgacaacaaacagagggaccgcaatcgtggggttcataggcggctccccccggccatttcctttgagttccacacccatcgtgccattaaacaggcaaggggagctcaaggtcaggtccacaggcacagggatcgtcgatcgtcaaccacaatgaacagagttttaaccctcaaggattcaagaccaagaaagggaggacacaaggtttaaacgggatagtgttataaaggatactcgggtcgcgtggggaaaaaggaagacgtgggcatcattggcgttgtattagtttccataccagctatagacacatgccgtcattgaccgctggaggccccgcaagtttattttctgtgaagacggacgaacccaccctcacgtttacaaggcaagcgtagacaattgtctcacatggccagtgtaacgtcgaaacgggcgaaacggatcttggcaacgctaattctattctgagtggagatgatggacgaggctgagtggtgaggaattccaaatatcagggaagtgccctgtcatgaccaaatcgaagggcatgtggacctcgacatagtgtggcggactgtgtaatctttgcatgtttgggtgttctaagaacacggggataggcgtggagacggagccgctactgttcggcaatccggaaacggaatgttgatacctgcactgctgtcactttcagcattcctcgtcccaatcagtcatgagataggaacaaagagatgagaaattcaaaactaaccattttggttcctagagagagttaatttcgcttgatctttgtagagcaattgtctgaatcctcaatagcaagatgcttaacgtagactcgaaccccggacactcggtccagtgggatgcaactgcaacattagagacaatggtcaagttagaggaagctgtagcgtagtagtcttggaaccttatatatatgacgccatagtacactatggtcagacttgcaggcgcaaagacttctgaattggttcaagagattctaggtagaggtccgtgtgtttagaatgacaccagatggacaattaccaaacgacttctttcggcctccatgcccagtcagtgagctccattaagccaagtctcgcaagcatcgctaagcattccgcttcagggtaagttgacggtcgtagcggggctgccccaggaaaactgagtatgtcacgatgtgtaagagaaaggaacatgatcatgatcatgatcttcacggaatatttcagatgagtcaaagttcagtacctagtggcgtgactacagagtccagactacaggtcaggagtcaggaggtccacggcaatgagattggtggccttggcgtcctggcgaataaagttgatgccttacattccagtttcgttgcatactacttagtgcactgtttccagcactcaaatgatgaggcttatctctctaatgtactattaaaccaccgaagctgatacaggcaaagggcgacgggcgaagttggtaattgtcttttctacttctgttacatcctgaggtcctcaggtctagattgctccaaacatatataaataccacatagtacataccaaaacgggataactaaacggtgtgataccggaatcatcagatcccttgagctgtgacctctatggtggctatggcatgccgacaatggattgttgcatgtcagaaaggagacaaattggaaacatacgcaaatctcgctgttcttgtagagccatcccctgtaaaaactgattcctgagaacaggctgaatgcagaattgttctattaggagcctaggctctatagaccagagatcttctattcatacagcacaaatggattcattcaaatatcaattatcaactatgttatgataatgccattctagttggcgctagagcctgtacaaatacgctatttctggggttattccattccccctttttctcatgaccaaaaggccttgaccataaccaattagaaatacaaaaaccgaaaacgccgtcattattgggtttgcataagtgacaccacacccgtcctaggatcattagacatctcagctggggacctcctgtacattggaaggggcatgaggtattggccttccatcttcttcaacagagaggctgccatacccagtgtcgttgctagctgatcgtgcccggcggagaggcggtctttcgacaggatagtcaatcaggtcttgatcggcgtcgctttcggatgactgagattctcccttgcgacgacgggtcctgcgtttcttagacatagccctgtcaggtgcggtgtgcacaaaatcttcaacattgatgcctgcattttggcagattgctgtgcacgagttgacaatcacctcgacgagagtagatgaaaagccgtagaaagccggggtgtaggcatttcgggcccaatatatgagctctgctgatacccgcccgagattgggaatgtcacgggggcagagggagagcttttgattcggacggggtttttcttcggcttcgtcgtctgcggaagagatagccgcctccgaggctggagccgaaggggatgaatcggatgacgcaatgtaatccacgtcagaggcgaggaggtgtaggagatgatagacagacgagaaaccgatgagagaaagctcgactggatcaatcggaagctgattgaaccaagacacggccttctccatggtgaaggagtcaggtagtgaggagacaccacctgtggatcgttcggtgacaatggtggcaatcatagcacagcgcacggcgatggagatttcatcccgcacggaaacgggcagagaggaatcaaggaagttggatgaatggctgtgacttccctttctcttctctttcggtagcgcggcaagaaccgccccaacattttcaatgcggttgtgctcgaagaaaacggctttcatcacgagtgcccgagtatgcgcggcggaaagcaccggcgccacatcaagggacatccgaatcttctctttgaatgcatcacggcttgccttggacaccgggcctttcccgcttgcttcgaaatagttgagaagagcggtttggagaagatgactggaccaccaagctgcaagtgcatcttgggaacattgaatagctgggtcctcatccacaacatcaagcagcacttcgtcatcgccagtaccctcctgggttggtcgattccaggtcaggttcacagcacgctggataatgttgtcaatcatgacatcctcgcaatccagtttgatcagggcagcaagatgagggggaagctgatcagggtgaccctcgggcagtgcggaattgatttctcgagccacaccccactggaatctggcaagagctcgcgcaatgtcgtttgacacatggaatgaccaggagcccgcctctccgacgttccacaagagaatgcggacatgcaaggcctttattatcattcttgcgggagtacaagggagtgtgccggcagcgaagatagtgagcacaaggcggctcttgctgatctcagcatctccaccagtgagttgagcatcaattgcgatatcccaagtcttgactcgtcccttctcatcctcctcggtgattccggtggcccatgagtagactttccatcccatgaagcatcgtaagacgtattcgaagcatctcgaagtaacaacataccactctcggaagaatctatgacgtggaacaccgacccgttgcatgctagtcagccaagcctgccgacggaaatcactagatgtaagaggcgcagccgggccctcagtagccaatttggatgggccgcgtcgggtgattggctgcgcattgaacaagtagacaaaaacgataaaggcactcccaacgaccagcgttgccagaatgaggaaatgcgaaaatgcacgtgcctgccacgagtaccagaactgcttcaggtagaattcacaatgtgccagtgtgggggtttggaaacggccgagaagactgatggggagtgaaaacaggcccttcgactcggactcggaatcgtcagagcccataccttcaagaaccatcagaccggcaagagcacccagcatatatttgttgggcatccttgaacgtcgagtggaggtatcttctctcgcatactgcggttgatgagatgaggatgatgacgaggggtacttgatgtatgattcagcaaagacaccttgctttgccgtttcagctcgcatacgtttccacgcatcgggaaccggaaggaggccttctggggggttcggagaggtgggtgaactctcgctggacacatcttccgcctgagaaaagacactaggtgatgtaccggagttcgagtccgtcgaggcgtagttgctgggcgaggacacagagcctgaggatgtggcggcctgatctgctactttatcagcctggcggagtcggttcttcaagtcggtgttttcgtcttccaagcgttggttacgaatttccagatgtttgatgtactccgtcgctttcgacaaaatggatgctttgttgagcttgttggcagcatttgctccctccgcttcgtcgtcatcatcggctgagcctccattcggattcttgggcgaccgcaggctgggaacactgtcgcgaagttcggcgattttatcgttcaaattggcgcgataccgcttctcaataacgttgtgagctcgcttcttggcgggcattttcttgcccggctgcactggtccagtcactgtggtggcatcgtcatcgctgcccgtctttcgcttccggcttgtgccaacactggagattggagacaccagaccgtaaggttgctgctggctcgtacgatttggtccaggcaggcgatgggtgtacccaacgttgttcccggcattgggctcggatgggatttccatcaagccgagtggaaggttaggcgagaagtccccgtagttcaaatgacttggggagctcatatctgtctgcggggagatggatggtagatctatagatgaggccattggcttttgatctccttccgagaacattggttcatcccatcgcatccactgggtccaatcctggttcacattctctccgacgggatgtgtgaacaaatgaccatttcctcgtgtctcatccccaccagggtttcgtgaagaaaatagctgaaagtcattctccatattaggaccggacatcttggacggctgggtcctcggccaatgtctaagtccgaatgagtattgggcagtctagatagttgtcactgataaacatgttagtttcagtaatacagaaaagccacagctcctttaagagaacagaatctagctgcctgcacagccataggcaagcagaaagctaggccgagacaggctagcggcgatccctgagagcattaaggaggtagatagatgatactgactgggttcaacttcaagtgtaacgctcgaactcaaatgcacgaagcttaatagacgtgaacgtactccgtgctttctgcaaggtgagatgtaaagactgagttgcgaggagggggatgtgagtgtaacagtcacgggcggtgctaggcgattggaggagcagaaagcaggggtggaagatacccacatacagacgtaaagtacttagggcccaaggaagcaagtggattcccaaattcgttggcgtcaaggtgatctccaagagaaggtggatctcatgcgccttgagaaatacgagaaacaacgtaatgggaagagacagccctagagatacaagctattgcttcaaactgtgattaaactgccagagtccccatgcatgaagatcaggggaggttgaatggccaggcagccggggaaggcagtttcgtcgtatgatcgcggctgaccgcacttccggtcacccctgacggtatcccgggcgttaattacgctgagtcatgatattttgtgcgtgtaacaatgtaatttgtgttttgtgacagtaaccaaaagtcaattatcattggtcatcaatatccccactttgcctcctcctgcaggtgcccaagaacgtttcgagcttcaacttcttctcttctttagatttctttgtctactgcgttgtatcttcttcctaaccttttagattcacttgctgaaacaaagcgagccgcatttctcgttttcctcgcactcgaatcggctgaatacgtccgcgcgtgatgtcttggcgccccgcgggtaggcgacacgggaaaaaatgggcgtgttatgatcttatctgatcgtgctagtctccactcctgcctcgtcggcagcgccggaaccagagcaacggcgcaagaggcgaatggaatcaacaatactcgtactccgtacaatataggctatgtggatctgaatccggtatcgcagtccacatttattcacttcgacagaagcacatggctctcgcgaccaatttctggaaagctaaatgaaaatctctgtctgatgcttcggacaatatgcatcccgcgtcaaattccattgaaccgccgactgatctcattattaccacaataagctgaaatatgttgactgggtaccatccgggcaagagattgtacttgatcatcccctcaccgactccttcaatacgtcaccgacctcctcgtatggagcacccggcttgagcctctctagcgcattccccactgtgtattttatcaatgcagagcacagatttgatacataactcactgatactatatctaagttagcacgtggtcatttgttacaaccaataataaaacgggttgcatggagcctagatcggttgtgcgggcccgattatgagctgccaagctgagatgagacttgtgttcacaagggtcgcctttcatagagttgagagctcgttggtgggaccccgtttgtattgggtggaagttatagccgttccttcagaaaaacctggctggattgttagagttacattttcaacaatttggccgacatcggcgatgaggtcgccatagggatcctcgatgtcacctttgagaacaaagccacaactgcttcacgtcgaaaactttcatggagttccggggatcaaatatggctaagagtcctttgaagacattatagctaaggccaggctctttcgcggtctttgggggtatttgtactgttttctttatgaaacaaggtgagcgatttgtctcaagttttcatatattctacctagatgcgcaagtaatgtcggggctcttggtatttgttcttcactcagaatctcgtaccgttcttctcgactgcctagtccccatgaagcctatcatttttgattcagacttctggccgactcttgagagctctttagcgaacgagccgggtcctctctgtagtatgcaggatatttggggatggttgggctcaggaaattgaattgagtggtagaaaagatgcctctgagatttcaaaggatgaaagagaaggtgtaacgtatagagtgatgggatactatagatttgatcggtattactaccatgaacaaaatatgctaaagagcactccatttgtggggcattatacccttctccaccttaatggatcgacgtctgtgctgccgagaaaggatgaaaaaacacatttgataggttggcattcaggtgaagagaggggagaaaataagaaaatcgcaaagtggagggggaaggcagagaaactttgtcttctcgaaacctgccggtaccgatgagttttgcatagcattcaaaataggactgcaagataatcttccttcaggttcccagctggattggtgtctcatcaattcagttgcacgtgttccaaggcccagagagttctcaacggggtcaataacatggggaggcgactgagaatagggaccaatctgaatacttcacgagaaagaaagtggtagacaggctgaggactttatggcatcactggtgtacaaacatacgcgacgacaaaacatcaacaacagtatcctcttctccaacctcgtgccactggctcaaggattgatgaaaagaaaatattctccacgaatggaggtgccaaataatacgtctgccgataacacgagtgccattgaacaaactgttccgccgcgtggtgcaatgcagggaccagcctgtggtgaactgtcatattgatcacagtcacccaaacatggtacgatgaagaagaaagaaaaaaaaaatgagaatacgcggggaggggctcgctatataccatttaccagaggactgcgccacaatagaatgtttgttccttttgtatcacacgcctcgattatccttagggattcctaagccacagagtactgccgtgcatttgtgaaaattctaaagcaggttagttgagcggtacggcccgccccgtcgatgtgaaaaccttatatctccgtgttacagtagaagtcaccaacgaatttggaaattgaggctagataggcgcagaagagcagagaatgatatgtctcctaattgtattgaacaaagtatgacttatgccgttgccgattgacgacgtgagacggcgaggactatacatcatcatcatcttccccagagctttgcttacacacttgagatacaaagcctgtgaattatgatggaaatataccatggtctatccaacacaactgagatctggtatcctactcgtgaccccaccggctcatcaaaggacagcagctgatagggccagtggaacttgttactctcatgcttttttaccaagcgcaaagcccctagagagaccagcttcgacacatgttcagggctctcgattaagtgtgcaagatctctacgaaccctgcctgtgctgctcacatccctatttctccacctcaggggaatccatggagtctcggaaccatgaaatccatctaccgtcatattctctacttcgaaccagcgatccttcctattgtaccagaccaccgacactgcaatcgttacgcgacgagtaactactgagacaatgctcgcctgaaaggaaaggccttccgtcgttgcttggctctaatcgagcgatgcacaaatgatgtcgaaattgcactatgtatacagtgaagggatttctgtttcatgtcacatttgagaaggagaatatggcagtcatagtctcatttgtcagttgctcgtgatgagaggatcagcctggtggctgatcacccagaacggatataatgcaacttggccgaatacatcgtgcggggggatataaagagatagactccatatcggtgtctggccgatgatcaggccaccaaggtcctaccggatttcagtccgttcaaatataggaaggaatgtcttaaaatgagtaccttgcgatttgctactgttacttgtctcaatcacttcaagtcaaacactctttcataatttatttcttaaatatagattcatgctttatgatcttgcgagagagcactctatgataatgtgcatacatgcacatatcacactaaccaaattactaactaaaagagcaataccgagactgaaatgagctcaaccttcaatctcgactaggcagcacgatgcaaatttagtgctgcagggatggtcagtaacgagtctacaatgtgctagagacaatcaacttaccgagatatcttcccatttctcccagccacgcccacgaacctgagccagttcttcatccgttagctgcttgccggtagtgaagtatcctgattggatcttggcatcgatctcgactcttgaatcactagggatcatctcatcggggatagggatgcgctcgataatattgatgccggagttcacgatggcgtcgtacttcatgttggacattgacagcatgcgatcgatcttagtgatgccgagccagtgcagaatgtcgggcataagagcttggaatcgcatctgcaggggatgaggtcagtatatgcgagtcacgtggaatgatgaggatacttacatcgcggacaccggcaatattctctgtccgagtgaaatacttatcggcggtgtcgccaccacgcttgcgcgcattgtacacaagatacttaataacttctccaagggctcgaccttccttgcggaagtagatgaccacaccactgccgccgttctgtgcctctcggattgcttcgcgaataccgaacgctaagtatggtcggcaggtacagatatctgactggaagacatcactaccattacattcatcgtggacgcgcagagccagtttgacattagggtccgcgatccgctctggtgggccgaagatgtacacggtaaggcctccgattggtggcaggaatgttttcagatcaggccgagtgataagctcagggtagctgccaccggtatgttcgaacaaagtccgacgaagagtgccttcatcgacgccaaatcgctctgccacaccgggaagataccagacaggctcggctgctactttagtgacacgcacctcgccggatgaatcaaccaagacagacccgtccacctcgagcaggccattcttgacgtcatcggcaatctccgcgagtttcatgttcgcccgagtgactgccatcgttggacggatatcccagccagcctccagctcttccttgaactggttgacaatgtcatgaccgtaaggatccatagagacgatctttttcttatccgcccaggcaggctgcggggggaaattgaaagtcggctgagaattacggaaatccggtcggaaatccgcatccaagtcaccagcggcaatggcaagggcattgtatacgctgtaactgccaccgtgggcgccgatggcattgcggcgcttgacgaggtttccactgcgggatacaactaccggaccccgggatttggcgtcgggagcgccccactccagagggacgggctcaatgccgctctggcctgggtacgtggtcaactatacttgatatcagcatcatccgaagacattgaagtcagcccagatctgatctttcttacgataatatggttgctgtatcggggattggggtcggcgggggctgcggaggctgcgggagctgcgggagctgtagatggttccatttgtacgggcaagatattggtgacggattctgttttcaacatggtaagagaatatacggtcctggatgattaccagaaggatgaagcgatatagagaggttacaaagaaaagaaagagggggaaagagacctggaggaggggaagtagtcggccatgtgacttatcttctcctcacgttatctgaggggcttatctgcatacaatcaaaaggacgaccggtctcagatagcacgtctgaatgtcttggctttggttatcatgtagtatcgtgtacaaatcgaatggcggtatatggtgtacatacaagttctaacgatctccctagcttctatacggcgtctccaccggtttccaccggagttcttcggcgttcgatctaactggccggagttagcgaacaccgaaattccctaggtgattgcagtttgccttgaccacggagtccgtacattaagcaggatttcctgtatctccccatgaggtaaatgctttcgttgatttcaatgccacccgctaacgacgtgtacgggcagtacctcgcgtcgtcgcaatggcaaaccagcctcctgcgagccgtgtcggagagacaaagtccgctgcgaccatgcattacctgtatgtactcgctgtagagatcgtggggtctctatgcgatgttactatcaccccgcccctctgacgagggccaagggtcgccgtatcttcccactggcagagggggtcccctttgatcgacctccatcagcaaggtatgttaattgtaaattcagttctttgtttcattctcaagcggtctacaccattgagttcccagcggccaattaccgcctcaatttacctccatagatatcaatatatacatatcagcctcttataattgctgtttcccaggaaccctcatccaaccgagacatcactcaatcccgacgtgtctaatgcgggacaagagagctcttctgggcgcatagcccgtacccaaccactgctttctgggtacttcggccccacgagcttcgtatcccccctaaccgaggatgtggacttgggccagggtctgggcctggagattgaatctgcccagagagtcctgccaccctactgggtccacaagatctccgaagtactattaacactcaacgactttcccgcagttgaggccctaatccgtgattattatgcactcagccaaagcgcgattatagcggcgccattcgtgctcaacagccttggaccggtcaaatccatgtgcaaagagaacatagcagaccgtaatcttaccgatttcacatcttcactgacagtgagcataatacaaaacacatctgagattttcgaagttccgtctgcaacacaagggcgagacttccacaccctatttacggggcccgcgatccgcctggagattattgggcttctctgcgccctcgctggtcgggcaagatatctagggctcgcgagtgacaggttcgatggcggccgaacctcgcggtcacaatatgcgcataagatgcttgcagccagcgaggccgcgctgcacatttgcaaaattctcacaccgctcaatgacctgacagtatggctggtacatgagattctcctattgtcggatatagtacatggcgactccagttcgttaagtcttccaatatatcagtcaccttgccttttctaacacctttcaggtcccgcctgttggaaacgactaggcgagctttcaactgacatttttgcacttggtcttcaccgtgactccaagacatcgagcggtgtacccgagtttctcttggaggcacgtagacgccaattcgctgcagcgtatcagctcgacaaaagcatcgccacattcttaggtcgaccgccaagattaccatggcgatacgccgattgtcgcatgccactcgatatcagcgatgaggcactcgctaccgataaaacaatcctagattacactcgcgactgcattgatgagaatggctggaatatccacggagtagtccagcggtcatcatggattcgagtgcgatttatcatcagtacatttcgggatgagattctcgaggtctctttgcagaacgtgacacccgagatggaaattatgctcaagtaaatcatccctttctccgtactgttgttcagcagctgaaactatacaggaacatctctcagcgatgtcatctagcatgggattcgctccccggttggctacgctacagcccgcaatgttgggatcagaatttacacgtagcagtgtgcctcatgatgattatttcatatctggcatacctatacaacgacttcctcattcagagactcattgccgggaagaataatccgcgcggaaacacagcactgctctccgtgagcgctgacatattatcaacggtcctgtcattaggcattcaacgcgagcaaatgattgatctccggccagattttgcgtggacagtaagtactaactaaattgaagctacttctacccatgatactaagtgaatggcaggttctactctacggcttccccagcgccagtctactcatcaaagctttgcagcatcaaaaacgcacaggcgagccattcctctacgagggatctagatcggcacttatccgcaatttgagtgtcttcatttcgcatcttgaatctatagttcggccggataatgccaactatgctctctttcagcgagccagtcagctattctcgaggattatcgatgaaattctagagccgcagtccattcttccggactcgaatcttgatagttctgcttttgactttgatccgatgattgaggttgatggcctggattttttcaataacatggattttggtgttgcctttaatcagtggttgttttaggggcgatccgtgtatatagtcgtgacggaagtgctttgtgaatagacaaatcagagtatagatctgcctctgtgaatttacctcaaggggtaatcatcaacatcgtcagatcttctcggtctcactcactaccaccgtattgggctagactgtatgttctctacgctatgggatggagtagaatccccgcggaacatgaactctcaactatatgaatgattagcaagagaccgagccagagaaaagacagacataggctcaaaggtgattccacctgtgtaatgacgtctgtctaagcaaaagtactactgagtcaccgacttacctcgggaattcgacgcagcccgaggaactgtagctggggtctaagttgtcgtaggtaatggtgaccatgacgatagccagggtgagcgatatcctctgcgtgtctcaactccgcgtcgattgttacgttgacattattgctaaaccccgaggtctccatgaactgggcagagaaccagttccatgacaggacgaggaagatgcgagggaatctgaatacacgaaagattaataggtgccgaaaaaaaggaaaagaagacaatctacaaagaggttgaaaggaaaaagaaattgtggtttttaacaacaatcgacttccttgatttgaagccagccgcttttggcatatctggcaaatgaaggccaggagaatgggctgcaggggcagccatgcgcgcaaataggtatctaatttcctctcgccccattgacccgcgaaaaaagaagagatttcgttactctccaaagcatgaaacgtgaaattattcgccagaaaattgagattgaaggaaggggtcaatgtatgttgtatgacatcgacaccgacaccgacaccgacacccgtttcgtacacttagttgccttgggcgaagttggcctgagctcgggtattcttgatggtcttcttgatcatctcctccacttcatcccagtcgctagtatcaatgcggtcgatggtacactggaagtgctcttggatcttgcgaagcatctcccactcgttgcggttggaaacaaatgagattgccacgccaatgcgaccaaagcgaccagtacgaccgatacggtgcagataggtctggtagtcgggtgtgttggtgcgctgaccgccagagtattcctcggggatatcctgaatgcgagaatggttagtttggacgtgaaagcgaactaacaatgaactcacgtagttgacgaccaaggaaactgtagatacatcgattccacgagcgagaacattggttgtgatgagaaccttagcttcaccgctgcggaaggaatcaatcaccgcgtcacgctgggatccctcgacaccaccagtcagcgaggcgacagtgtggccctcagcaaccatacgcttctcgatctcaacggcagaggcacgggtctagagagcggtcagcaaaattccaatcttaatctgagataatacttacccgaacgaaaatgattgaggatccgacagtgagcagtccgtaaagctgaacgagattctgatacttttcctcgtcagtgctgcaatccatgtagagttgtttaatgccctcaacagtcaactcctcgtgttggagggtaatctcgttagcggcaggagcaaacttgcccgcatagcggtagacatgagcggggaaggtcgccgagaacaggacgatttgaacatttcggggaagcatcctattcaggtgaactattagcccggtactttgagtggtggaattagtacttacgccttggcccgaatgcactggtctcccaggccttgctggtcaagcatgttatctgcctcatccaggacaagcaccttcaaaccggtagggttcatgacacgcttcttgatcatatcctgaacagtaccaggtgtgccaaccacaaccgaacaatccatcttcgtcgggcgagcattagaatcggcaggaacagcagttccgataatgagcccttcaaggaattgacccataatctggatcactccgacaatctggcgggccaattcacgagtaggagcgagaatcagagcttggggtgttatctgcgactgctccgttgagaggtcaagacgactaagaatgttgaggacaaaggctgcggttttaccggtaccagactgcgactgaccaaccaaattcttcggaggattgctcatcagaaggggaagagcacgctcctggaccttggacggcttgcggaagttcatggtagagagacctttcagaatgcgcgcatccctggagtgtcaatcaggttagctgtgagactctcatttggacgcgtatcagtgggtagcacttgcaggcctagatcttcaaagcttttgaccgagaacagggggttgttggggtccgcttgcaagtcactcaatttcaccgcgacggtgtagtcaggctcctcgagatctgccgagccctgcgcggggccagaggcgccatcctccttagaaatggtggagacattggcgggatctgtgaaagtaaagaggatattagctatcagccggggtagcgcgttttccggtcgtgtggactggaggaacagcgacggtggcgtggtctcgtctcgtaccggtgggaatcgactcgtcaggcttggtgacacggtcagccaaggagcctgcagcaggggcagtctctggattctcagacattgtgcaaaagtttcgtgggtatctcgagaaagagttggagaaggaaagatggaggggtggtcgtggggtaaagaaaagttcgaaatgaaataagatggctgagcccgcgattggggttaatatggtcacagctgatgatgcgtttgggactcagaaggggataaaatcaaaagcccaagcacgtcgccagaaaacaagagctctctctgaatggaagcaaaaacagatgacgccgaagaaagcaactagtccgaatttagtcaaagtgaaatatatgtactggtattgtaaactattgtaatagatgggcaggacacatactaactaccagcaacgtgtatgtttggtattgtcacagggaccggtcttctccccgccttggccattgaggtcattcttcctatctgaatggcctcaatagccccattgaacacagcctaattggagacattaactacttggttgatactaagacaggtggttcattcacgagcttcgctggtaaccggaaaccccgtctcattgttcggtctcccattcccgcgctatcccatgcgcgtctgccttggaatctcaatcaagccatggcggccgcagatgtagctccgcatttcggagcagagttaaaggtattgatactggatggtgattttgcagatgcataactaaccgattcaatttatctaggattccttcaaaccagttaacagttgggtatggtccctacatcgtttccccgcaaccgacccagatcatgcgcttacagtggagctaatgcaaacatgttgcacaggtatcgaatggtatatcatgggtggacgagatacaccaattctaccgcgagcgcagcgccattgagaaggaatacgcatccaagttaacggccctgtgcaagaagtactatgaccgcaagtcgaagaagatcagtcccttgagtgtaggagatacacccaccttgacccccggctccctcgaaagcgcatcgctcactacatggactacacaattgaacgccgtggaagctcacgccgccgaacgagacaagtttgcccaagaattggtagtgcaggtggcggatcctctaaaacaagctgccacccagtatgaagagattcgcaaatgccatgttgaatatcatggcaagttagaaaaggaacgggaggcagcatacggcgatctcaaaaaagcgaagggcaaatacgatggcgcatgtcaggaggttgaatctcgcagaaagaaaatggagaccgcttttgatcatggcaagggcaaagcacaagcagcatatcaacaacaaatactggagatgaacaactataaggcatggctcaatctactggaggcgcatgtcctgatgctaacttgcggcagaacctctatctcatcggcatcaatgtgaccaataagctcaaggagaagttttaccatgaatatgtccctgaagtgatcgatgtaagatgaatccgccactcccttctcctatctaggatcgacaatggtactcatacttccggtcagggtttacaaaatctcaatgaaacacgagtcgcaaaaatgaacttgatgtggtcgctcgccgcccagcttgaaaagtcatctcttacaaatagcacgcagcacatggctaatcttcttgtcgaaattcctcgcaacaatcctcgtctggactccttgatgttcctccagcacaatgtgactcagtcacaagaacctccaaatctagaatttgagccgagtccagtatggcacgacgatgctgcaatcatcgccgatgagccagccaaggtcttcctgcgcaacgttttgagtaaaagcaaaactcaaatccgcgaactacgagttgagtcagaccggaagaagcgcgaagtcgaaggaagcaagaaaatacgggaaaatattcaacaaggcaaagataatcgaaacgagttagatgtcgtgcggtccattttcttcattcaagaatccttgcacgaggttgattgcaaatgggtcacagccgaggtagaaacggcgactatcattgcagtggctggagatttatcattgggagcccagaatcacaatttccgctctcagacattcaagatcccaaccaattgcgatctttgtggcgagcgaatctggggcctgtccgcgaagggctttgactgcagagattgtggctacacctgccatagtaaatgtcaaatgaaggtgcccgcggagtgcccgggcgagcaaagcaaggaagacaagaagaaactcaaggccttgcggcaggaacaggctggtgccatacctgttgtggatgtcggcacccctacagcttccactaccaccccgtcactgacgcgacagaatacaatgaactctcttagctcaggatatgcggccagtacgactcggtcgatatcgaacattgctacccagtccacagcagaaagcccagaggatcccccggcccttgttgcagaggcaaagccaaagccaactgtcgcagcaaagaggaaccgggtgctagcaccacctccgacagcatacatgactgcacctccgccgagcgacttgggctcgaagcccaaagaaccacgaggtaagatgctgtacgcttatcaagccggcggctcagatgaggtcagcgtggaagatggggacgaagtggtgattctccaaccagatggtacgtcttttcctaccgtttacacctatatttactaacaatttcacagatggttctggatggctgcgtgtgcgctcaggagccaatgaaggactcgttccggccgcatatgtcgaagccgccccggcaccatcccctgtgccatccgctagtcccagcatgcctgagcgacctgggtcaacgtactccaattcttcttcatccctggcgggaagcgctgcacccaagcgtgtaggaccagccgtcgcgcccagacgtggagccaagaaattgcaatatgtcgaggcattgtacgaatacgaagctcgcagcgacatggagtggaatatgttagagggtgaccgctttgttcttatcaaccgggatagtggtgatggatgggcggacgttgaacgaggcggtgttacgaagagcgtgccggcgaactacatccaggaggtgtaggctggacgtctagattctgcccattggtcttcatacatgatcagaacagttgatgctgtctgagcttgtctgtttgtacggcctcataaggtccagccttggtttccgttggtctttttctttcctgtacagtcggcgtcatcagtgccgtttcgtcattgttctacataaggagcattgggggcattcgtgttggcatccattcgcgagtctcggatagagcataggacacgttgtttccattgaatcccatgaaagtcgggactgttctagtagtctgtaagaatgtagaccattactgaagatatacccgtatacccatcttagataacatcaaaccggatcacacggatagcagttctaccaacttttccagtctccgtagtgatagaagtgagttcacggaagatgtatctttaatgtgacatatttctatttccacaattatcttgactgccagacatctagcgctttagcctagtggtcacaaactaatactccgcatttgaattggacttggtccattgccaagtgcggacgacaatagccgcgcaatggatccatagttacgaatctgattagctcaggctgtaaattcgacaatcaactcaagcccgaaatactttccaagtgctatgtacatgtattcttatctccgggggaaattaaggtagttttgactcgatggtgtgacatgcttacgcctacccggtggattcggcgtgtcagcagcttacatcaccttcgctctagctggattgaggactgatcagtctccaggctttggagctagcatagttcattgtagggtacaaggtgacagaggtacttccaagaaacatcctaggcaatgcctcttggcaagtggaggtatgacataaggcaagtcttagaagtcaactccgtaaatccgaacttcctaatccttccaatatcaccacctcgtgaagcaagtttccgatgctgttaatccgtgatgactcggagatatgaagatacagaggcttaactccccgtgccaaggccgctcagccccggcatacgttatcctccaataagcgccaagagggcctcctcatggcccgtcaaacgtatgtaaatctaagctagaccaaaactcaaaataaccttggaaagcgacatataaccaactggcaccccggaaacccgtttcctcggacgtgggtacttagccatcgcaagctggacttcaagaatcaaaaatcaaatccctccacgcgccccctgtttgaccgcagaacataatgctctttcaaccgttatttaccacgatctgcgtactgcttctcggcttgctagctacaagcgcgactataggcattcggccgcaaatttccgggctggacaacaccctcggagctacgattcagacgattaagaatactatacaacaaccgccgatccacgatgcagcgtcagtaaccgttcttccccggagatccgaagacgaagatcatgacgcaatacccgggctccacgaaacaacaatagactggagagaggatgggtctgagtctctgagactggaagcagagcgtgaggctggatttctgccgagttctcatagtgagaggtaaaagttgtatccagttgatcagctagtcagtagctaacatggtttgatagttatgactcgttaccgcagttttggcctttgtttaaaatttgtgtcgtttcagcaatcgtaatttgtattcttaaaatagcccgggacttgaggaggtagcaataaaagcaaatcatgacatttatgtttctgtacagcagagttggctttgattcatatggcacatactagtctggccatgctgcgttacatgatgggtatctcatgagttcttcctggaccaaaaaagagatgcgaaaaggggtatgattaagataggtgcatagaattggtttcctatctattgtttcgctctcggatccttctagcgcgaagacccgactatttactttgatagcatagttgaaggaactgtggcgcagggatcgtgcaatcttaaacatctgcaacgaaccattatttgcgacaacaacgtcattgggcaatgagttcgatctagaactttattattttattattctgatctcgtggcaatcacccgaggatgatcgacgatccttccttgccccttgcatcacgaaccgtattgcagatcgagtatcttctccttgccatagaacagtcaaggaacaccaacccctgctctatgagcttgtttcaataatctatgacttcaatggcctttgtcctagcatatttctttcagttccttcgaacaaggatatagttagccgtatttactctcatcctgacggagtgcaatattctgtctgccgcccctagcgcaagataatcaggaacaaaagcaagtatggaacaatagatagccaaagcgcacagcgcaacgttacaccccaactctaaagactatgtaacataagagccacccaaaaagcaggctttaggtacgatatttcaaatactgtggggaggatggatgggtcgtctatatgatcgtcacgggtcggcccttggtcttgaaacgtccggtcctgagtttccattcctggcaataaagcataggttgtgtcacccctgaaactttgtatccggctctgcaggaagcatctcgtgtctgagcttaagctattgaattgcaatatctgatacgtacgattatatcacatcaccattgacctaggcctgcaaatataatcaatgatcatcatcctccgatcccaggctccagggctgtgattatagtgaggctaaaactccatatgtgtgtggagctcgccgatcatttgctaaggtgataattaatgttgaagggatcggcgcatactaggacctgatgcaagtgatcggagtgaggcgtggttacaccctcgatctgttcctgtccctggggctagactacaggggtcacgagtgctactgtgggattgggattgaaccatgaggctatcattctagaaaaagtaaatacatactatgctagtcatgtcgtcattgcgtaagtgccttgcttcccaggcatgtggcttttcttggtaactgcctgaatgggcctgatagtggagaatgggggtctggatttaaaacgtgggttttcaaccgaacgaccttgaccgatatttaggataatacggcgatctccgtacaacgtctgatttttaaaagctaaagtggacatattcggtaaaaagcggactgtgattggtccttgataatagtatgttgtaggcaaaatctgcctttatatacattgacataaaacatgttcgaaaatgaagtaacaagaatagaaaatatgtagccttcaagttaggcttgtggccaatgtgtgccaaagaactccccgctatgatgtcgcttgccaaaaaccgagagggaaagatgcgcctctgagaatgaaatcaagatcaaacaaaagaaaagaaagaaagaaatggatgcgaagtcgtgctcgctaaagccttggtgctgaatgtggctcaaaagagtagcctcgtataagagagaataagatgtcgcgaagtgaatcgttggtcgtgtgtgttcttcagtgaatcaccgagagagtaaaagaaaagatgcagttcatgcagttcgtgccgtcgccctcgaccctcgacgatattttaaatcatctcgactgaggagtcggcgtattctagagacaaatcgacagggtcttccatctggggaatgttagaactgaatgcgaccgaagaagaaaggacaggagtaagcttaccatggcgacgcatggatatggaggaatcatccacaggctgtgtagtgtaggctgcagcccaataccccgtttctcggtaaccggtgaaggtgcagttgctaggattgtactgtggctgcagggcggcaacatgcgggtagagcgttgctaacggtgagagaagctcatctgatggtggtggtgaccgtctgctatcgatgcttccacgagactggaatgtatatgttagactggttggcagaagtaagcatggatcgtacttacgtagagctcatagttggttttataactcataatgttggtagtgatggtgtgattgtctcaatgcaagatgacgagacctagttcaaatctgaatgctgagatgcaggtctcaccagaagcgaagccggctgcatttaaatgtatcggaaatgctcagccgcagcaaaatttggaagcgggggaaattaagacgtcaagatccgcatctaatcgcctagtttgttttcatagataggatttggttacacccgggaactcgggattagatggtctccaccgaaacgtaaatgaaaccttttcattggctgccacgaggaagtctaagcgttagggccgatcggagtccccgatgtgggaaagtcgggatacgaggattgcagtttgcaggatccctgcagaccatgaatcgtggcatcctcgttcgacgttgctgcccccttgcatattcctcttctcgcttccacgttttggttttacccttattctcatgaacatgtggtcctgcgggggggagcaaatatcgtcgaattccgaaatgtaagatgtgatacgagatcccatccccgaaccgatccggactctacctgtttcctatattgtataatgtcaagatgatttcattctaagcagaagtgggccacatgtcagccatgtcgcacaggtcaccaactaagacaatctctaagcgagtatattaaaagactaatgagatcactgatcttccgctagttgtaaggtttccaaatcattttcaaggtgatccagggcgagatagtgcgacagactagccccgaatatattgcactattgataacgctacgccagaaccgctctagatcggccttgggaactgcctattcgggcctagcggacaattccattgtcggttcgggacacagccacacaccccttgctatttgtggacaagcggacgagccacatcgtcggtctcaccgtggctcaaaccgtggctcaccgtggctcaccgtggctagtgaccacatctgtggctcaagcttggtttttgttcgatagcttcccagatccactccaccctgcttcacctcggaaacccgaactagtccgcccttgatcttcacaacttatcgattttgggcacccttaatggctcggtcttccccgtccgctgggtcgcggagctataaggcattcgtctcccccagaatcatgaactattccacaagtctaaatccacctttcgtttgaagtcttcctctttgcgcttcctatatcaacacatgtcgactgtcgaacatgtcactgagaatgcagggttctggaagagagtgctgggaaaactctcatcatatcgacatgcgcgacccttactctcgcgaacaacccgctcaaagtgagttcctttttctcttcacctcccctaccccggtcgtgcccattgcgccggttacaccatgacccatattctgagacctttcgcctttgttccaggatccgtcgaacgagacgctgaacgcatccccgataggcgcgaacgctcccacgacgagggaatgaacccagagacgcagtccatgttgagcgatgccgagtttggtcgcgtggaccatacgggctggttcccccactataagaattgtgttcaacatttcgtggactacagccagcatacgccccaagtgcagtccattgccgcgttcatcaatattcgactaccctgtcagcgacctgagtccagcgcaccggtggaaaccacgtcaatgccctttatttcgctgcgaccctacatccgacgattgattgtcaccgcgcaagactcaccgagtgttatgcaaggcttcttcggtggtgactgggaggctggtgtgggctgtatctacaagcaagaacgggtgaactatatgtttacggccaaaagcagtgggtgggcagctaccaagaccgcctacgacatttctccagatgaagaaactcccttcttgaggcccctgcgtgacccctcggaggatgaaattcgagtggccgaggcgcggtggagtgaatggctggcaatggaagattggatggttggagcgcgcagtccctggtaggatagcgcgatcatgaggcacgaatttcctattcttctcttttcgtttttttttttcttatgtccctcgtgccccaaaaaaattacagagtgtgatgtggcccaattcactgagtataatgacaaacgtacttttttttctccattttccatgccatactccgtagggatagttcttccccatagcaatgcagatcatcataagcatgtcaaaaataaagtaaataaagtgcagacattagagttgacgagatggtcctgcgtcataatcgatagtgcaccgccacaggcacagaccagagtgacaaatacttaaactcggagatcccaaatattaatttaataaaattccactccggacgtccgtgattttacaaaagattattctgatatctaactaaccagactcagttagggctatccacctctgactcaccgtcatgtcaggtgtcaacctgtcactttgcgatcaaatcgaggatagtctcttctgcaagttcgcttcaactcgtgtagagatatcgaatccaggttcccgggtacctggtacctcgcaatggcatcgacatgcatctacgagcatgatgcagccacaataatcccagccctcatatctgaactgccgtattccaccacgctgctccggcgaatccagcatggaattgggtatccgcacgagactgcccacatcctggcgactttcccacccggtttagcccctgagcctggacagccgtggctggctgcgcgggtggatctctttgccggccgcacaacacaaatgttcatctactccagtctcgaagcggagcacacgtcaattccgccgatcgccactgtcggcgatagtatcaaagccacgaaaccggagatattaaatgtggactctggatccaataataaccgaaccaaaaatggtaatgatgttggcgcaaaccctgacaccaacaccaagtccattgtttccaccttttccgccaacccgcccgtcctagccttggcccgcgcccagctattggatttgctgtcatatgtcaagaccaaattgctgccatcctatctgtcatatttgcaagccacatctgcggaagctgaatctcttcccgtgtcgacatccctggtgaccccaaacaccactcccagtaccaatagtactagtagtgttcccctgattgccgcgccagacccacacgccttcctcatcggtgcccttcatacaggtctattctgtctcctgcagcaatcaggctcttacacccaatctgacccgataccttgtatccgggtccatcgcttcgacgatccgccttattacaagtacttcttccggagatcagagttcagccccgatgcagatctaccgtgcgccgatctgtccctcccacccgggtataggttccatgaccgacaggggagggagggtgttctgagtaagcatctagatcttgtgcagagtcggacgcatatccccaggccgaggtcgcagctatctacaatgcctggtatggcggtctattttgatggctctagtgatgatgatgaaatgcctattgcgtggggattcttgggtgtagatggagcgctggcgacgttgcatgttgaacccgagcatcggggccgcggccttgcggctgcattgtctaaggctgttatgcgtcatgggatggcagtagatgggctttttggggctgggagtgttaactcggaggatagtcacactcgagaatgtattggggcttgggcgcatactgatgtagctgggtataatcatgcgagtcggagggttatggagaagattgggggtcaggttctgacgactgtcacttggactgttattgagttgcttgattagcgttttcatcttgggttgtctatatgagtggaagatatataatgaacgatggaaatgagtttatatatctttacacttatctatgcagcgatagctgtcggattttacaataggtgacaatttcaggagtaattctagttctctaatatttacatgtaaatggattctagatgaagccctaatatcatagaaactgcatagttatgttgtaaacactgaacgttgactcacctatctccatcgtccccagatattcccaattaggcttagtggatgatcgggtgattcgacgagatacacgggggaacttcacttcgaatttctctattttcttcatttccaagccattgaccaatctccgttccttcaaaatgagtaatcccaaaggcgtcgctgagaacatgctctggggaggccgcttcacccgtgagtaccacaacccctccatcccaccaaaaaagcccactgactcatacaaaaaacagagggcctcgatcccctcatggtgcagtacaacacgtccctcccctacgaccgcgtgttctggaagcaagacatcgccggctcaattgccttcgcccgcgccaacaccaagtccggcatcctcacaccgcaagagttcgccgagatcgagcgtggtttcaagcaagtcgccgaggaatggcaaaccaacacattcgtagccaaggagaacgacgaggacatccacactgccaacgagcgccgtctgggcgagatcatcggcaaggatatcggcggtaagctgcacaccggtcggtcgcgtaacgagcagatcgccacggacatgcgcctgtggctccgcgacgagctccgcgtgatcgaggcccacctgatcaatctgatcaaggtctccattgctcgcgccgagaacgatatcgcctatctcatgcccggctacacccacctgcagaaggcccagccggtccgctggtcccactggatcctgtcgcatgccactgcctttgctagcgagttggaccgtctccgcgaggtgatccgtcgcgtcaataagagccccctcggtaccggtgccctggctggtaactgcttcaacattgatcgtgaggccatggccaaggagcttggcttcgatggcttgctgtacaactccatgaacgcggttgcggaccgtgatttcgccatggagaccatgcagtggggtagctcgttcatgctcaagatctcccgctgggccgaggatctgatcatctacagcagtctggagttcggctttgtccgtctgtcggatgcttactcgactggatcgtcgctcatgccccagaagaagaacgcaggtaagtttgactttagtcatgtactatagtagaatactaacatgttccccattagacagcctggagctgctccgcggtaagtctggccgtaccttcggccagatggccggcctgatgtgcacaatcaagggcctgcccactacctacaacaaggatctgcaggagagcgtcgagcctatgctcgaccacgtcaagactgtcagcgacagcatccagatcgcaaccggtgtgctctccacgctcaccgtcatcccggagaagatgatcgccgccctggccccggagatgctggctaccgaaattgccgactaccttgtccgcaagggcgtgcctttccgcgagggacaccacatttccggccgtgtcgttgccctggctgagaacaccaatgtccccatggacacactctctctggcgcagctccaggaagtcgacgcccgcttcgatgcggatgtccagacttgccttgactacgagcgtgccgttgagctgaaggatgccattggtggaactagcaagcgcgcggttctcgagcagaccgccgtgctgaagaatttactgtaaactcttttggtacgatatatgacagaaaataaatgttaggcttttggttagactaaaatgaatatatgaattgacttgtttagatgtctaaaataaaagagtgaacttatatgctgctattaaaggagggatatcatacaacataccagaccattaagccggaactccaaccctaacataaccccgaaaatcaagatcaacccctcaaacccctcctctggggctcatacccatcctgccggacggagacttaatatcatgtccaggagctccctgtgccgcctcataagcaggcgggacatcatgaccctcggcagccacaatatcatcttccgaactgcgctcggcaggcctagacgcactgcttccacctccctggggattagaagtaaggccaccagtttcaattccaagcccagtccctccccgatccccagcatactgcataaaactcataacatgatccgtcccgccgcgctcagccgttctccccctttcgcccagcgcctgggacccagactctccaatttccataccattagagtatcggtccagattcgcgcctaggacaaccccctcggcagtgacgacccgtccagcctggttccgccccggactaccgccggcgctgtggctgtggctatggccgctgccggtgtcggctgctcgtgctgggcttgctgggcttgcgcgtgaactgggtatagaggccaaggcgggcgattcccaggcccgtggactagtccatgagttgataatgggctgctgtagctggcgttgttggagggatacgttgatcagctcgctctgggcgtgcgaggctagttcggcgcgttgccggtggaagcctgtgtctggtagctcgggggtgaatccctggcggggagggattgaagcgaagagctcgtttgagtgtggttgggttggggggatgggtgttttgcggggagagtgggagatgaggcttgtggcggaggactcaagtgctaggtctggggtgaggattatgcttcgtgtgctatctgtgaatggggaggcggcgctcgatgagtctatcgatgcgatggcttgtatcagtgatatgttacgctgcctcaatgggtaggccagttagtctgggatgtgtttctgcttactatgtgcttcgctgtctgatggcgatagcgggcctttcatttcggatgcagttcctcgatctttgtaccatgagacaagagttgtgccctcgcgtttcccatgttttctcttgcggcgacagcaacagaaaagcagaatggcacatatgaccaagacggcaactcctccaacaacaccgccgatgattgcgcctaggtttgaggatgtggcacctggggtattggatgaggtattggatggagatgcgctagatgtaacacctgtagattctgtagtcgtggatgtgtcagaatttttagaaagtggcgatgaagtcgccagtgttactgaggatgtgggtgtctccgaacctgttgatgtatttgaagtactataagctgtcgacgagacggtagcttgtttcgacagagtggatgtaggggaagtagtgatggttttcgtcgtcacgctggacaccccagctgagatcgatgagagtgtgtcatcgtcgtcgtccggacaaatcccagtcgtacatggatcagttgcgcagcatccacggaagctgcctgccgtgcagacataccacagcttggacccagtgcaagtagtatcgtctcgagggacaagagaccacagggactcgggagactccatttcgaataccttgaagatcaagtctcattcgccgaagaagacaactcgatcgaatcgcaagacacagcaattacgctggatagcacaagcttgaacgactggaagcgagagatctcgtttcaccgatatttgagaatctgccagaaatgataggtcaaatgggttgtgcctcgacaaatattctttgcaggcggcattcattaactttcgaatggagaccacgaccctgttttctgaaagaagtcgagaaaggattcctttgttggtgcggggtggcactgccatgccaattatagatccttgtatgtttgtcaccaatggggtccaaggctcctgcgcagcagagttgggttttctttagtgcagtagatgcgtctctttgacgcagattggataatacggtgataaatgatcgcagaatctaagaagtcagcaagaaatcagtcgtaggtcaataaacaaggttcgaaagactccaaggggtgttcggtttctttgttgacagaccagggtcgaccccggggattttgagccaaatcaaacaaaaaaccggagttttgatatggacaaggagaaaactacaataagaacctaagacggggcacagaaaagcattaagaagtaataaatcaaatcatatgagacaaacagagggaaaaagcactcagcacaccaactcttcgcctgttaagataaaggaaaacaatatggctatacaggatggtaagtaacacagtcaacaaaaaaatggtctttttcatagatatttccccttgaaacgggggccttgtgacgccacaagccatagttccgtctcgaaactacgaggctgggagggcgtcgatagggtccatctgaaacaactccgtggtatcctcctattctctgcgggtcgtatccaaaatagcgagcttagtagacacgcttgaaaggaggaacagacttgcactccgactcatccaaggtgtgggactgaacgggacggtagccaagcttgatctcgccgtggggaaccttctgccaggagagagtgtgcttcatccagtgctcgtcatcacgctcggggtaatcctcacgggcgtgagcaccacgagactccttacgagctgcagcggaagcagcggtttgggtactgtgagatccaatgttagcaagcgattcctagatcagttattcggagttacgtacgcgcaagtgagcaggttgcggagctcaagagtctccaccaagtcggaattccagatcatgctgcggtccttagtgccgacctgttcgtacagctgatcaaccttgttgatcttctcaacaccctcgtccaagctcgactgggtacggaagacgctgacatcggtctgcatgaccttctgcatagcgttgcggacttcaaaagtcgacttggggccatcggcattacgggcgtggtcgaggtccttgacagactgagcaccagcatcggctgcaaggggcttgtggggctggccagggctggaaatgtcacgaacacggtgagacacagcgcggccgaagacaaccaaatcaagcagggagttggcacccaggcggttagcaccgtggacagacacacaggcggcctcaccgcaagcgtacagaccgggaacaggcttctcctggccgttctcatcgacattgagaacctcaccagtgtggttggtggggataccacccatgttgtagtggacggtgggcaggacagggatgggctgcttggtaacatcaacaccggcgaaaatcgaggcagtctcggagataccgggcagacgctcgtgcaggagctcagcgggcaagtggctgagctgaaggtagaggtggtccttctcgggaccaacaccacggccctcacggatctccagagtcatggatcgggagacaacgtcacgggaggcaagatccttggcggtaggagcgtaacgctccatgaaacgctcaccctcggagttgatcaggtaaccaccctcaccacgggagccctcggtaatcagacaaccagcaccgtagataccagtagggtggaactggacgaattccagatcctggttagggagaccagcacgagaaaccatagccataccgtcaccagtgcaagtgtgggcagaggtacaagagaagaaggctcgtccgtaaccaccggtggcaaggacagtgtggtgggccttgaagcggtgcagagtaccatcctcctggttgtaggcaatgacaccacggcaaacaccatcttccatcagcaggtcgagggcgaagaattcaatgaagtagttggtgtggtggcggagagactgtccgtagagggtgtgcagaagggcgtgaccagtacgatcagcagcggcggcgcaacggtaagcctgaccacccttgccgtaatccttagattgaccaccgaaagcacgctggtaaataagtccatcctcagtacgcgagaatgggcaaccgtaaccttcaagctcgcggacactggcgggagcctcgcgggtcatgtagtgaatggcatcttggtcaccaagccaatcagaacccttcacggtatcgtacatgtgccatctccagtcatccgggtgcatgctaaaattcagttagactcaattcggtaccttccggtgcttgcggtgaaaacctactttccgagggcagcgttgataccaccctgggcagcgacagtgtgacttctcgtagggaacagcttggaaacacaagcagtcttgaatccagcttcagccagaccgaaagcagcgcgcaaaccggcacctccggcaccgacaacgagggcatcgtactcgtgatcctgcgcatgttagactcaatcaaccgcctgtgagtggtagctcttacaatgatagggtacttgtcactcaggtagccactggactccttagcgcgcaaaggctggttggaccatatccgggctggcgcagtttagttagtgacggtgcgttcatgggttgagtagtctaatgcgtacctgcgggctttgaagatgagaagagacgtctttggttcctcaagatgcgggaaacctagagagatcttatgagtatgtcatggccgttgcgaatgggctgaaaatcgttgcatggctactcaccttggaagcaggagctaaactccgcatactcatggagctcataatggcggatcaaacgagaattgggtttccctaaatgaaccgagataatcgcaggacaccgagggtcggtgacaggcttaacaaagaggggagattgtggaatagcgaactccttccagggcgacactttcatctggactcgggttacggttgaacagtttcacgctgacataatcattctcccagttgccgacggggaggaccgggccaaattagccaatcagcagctgcgcaatgaaaatcaacctcgggcagccggttgcccgtgattggccaattggaaaggatccactatctaggtgtgatattccattttgccggccaacacagctgcccggaagtcaacggtagagcgtcatatcacgggatcttgaatctatatctggttatcttttctaactttagtcccacttttcctagtagaatgacgtgcaattgctggatatcgatcattgtggtatctagtagttagatcgagatagtcatgtgattcaatatgaccagttagaatcacatgacaagccgtgtgcattccgaccaaatcaggaaagtatacggactacgtactacattggtagtacacaggttgaaattatattgcattgaccaggaaaaaaactcccatgtaacaagacaatagtgatcgtacatcccatccataatgcaagtgagtcggaatttctagttgtactgcatatatgtagccgtcgagttgaacttgaggttgcccttaatcaccttctcaacggaggccaagaagtccttctcggtggccaccttacggcgagcccgaatagcaaacatacccgcctcagtcgcaacactgcggagttcggcacctgtagcgttggggcacaatcgcgagatcagctcccaacggatgtctcgctcgacggacatgctcttggcatggattcggagaatgttggcacgaccctcgacatccggtagtgagaattcgatcttacgatcgatacggccgggacgcatcaaggctgggtcaagtgtagacggacggttggtagcgaacatgactttaatgttaccccgagagtcgaatccatccagctgtgtgatcagttccagcatggttcgctgcacctcgttgtctccaccagcgccatcgtcaaaacgtgcaccaccaacggcatcaatttcgtcgaagaaaataatgcatgccttcttggtacgggccatctcgaaaagttcacggaccatccgagcaccctcaccaacgtacttctgcaccagttcactaccaatgacacggatgaaggtagcatccgttcggttggcgactgcacgggcacaaagggtctttccggttcctgggggtccgtagagcagagcacccttgggtgggtcgataccgagattcacgaagcgctctggcgatagcaagggcatttcgactacttctcgtagcttctcgatctgttctttgcatccaccaacatcgccgtaggtcacatcaggcttatcttcgacagtcatcattgtcacgctggggtcgatctttggcggcaagggcagcatgatctgatacttattacggtcgacgctgcgaagcctagtcagtacatagaaatgacatataatccgccatataacttacccaactctcatgccttcttcgatatctgtcggactaacgcgctctccgaggttgacaacgaacttggcaatttgcttgacgttgatcacgtatttgctcttgtccgagtccttctcatcctggataatctttgtgcacctcgcgacctgtagcggctgttcctccgccatgcgttgtcgatcggcagcaacatcccaaaggtgtggaggcgccaaaccggtgtcagattcctggtaagacattagctcgagttgttcaaggggccgaaagagctggataagttatcaccttaacgccgatcttctcattcacgctgttttgcttttccttgatatccttctcgagcttcttcagcgcattcgcgtaaggtgcggcgccgtaggtcttgagtactgcgatgtcactgtaataagacgtgtcaatcattgccatcgcgctttgtgtagattgaatcgacacagaccgggaactcactcgtctgtaaggggcgtaatctttttctctggttcctcatcgtctgcgtagttcttcttgaacttctcccagttctcacctgtggcgctaggcatgatgaaaggtgttgacagcccaaggccgagttaagggagggtctgaggaaacaatgaaatcgaagatgtatatgcaggaggaacaaattcgacgtgatctaaagcggtgtcaagttgaaaataagatagataggttgggtattgggagagcaaaggacggtgatgtagcagagctgcggtggtcgagctagcctcactaatcaggtgccaagcttcatcaccgccccagaacctcgcagaatttcctgtgtgtcctccaccacaacaactcaactatctcctttcactcatttttaaaggttaattttgaatatcgatcttcaaaatggcctccgtactagcacagggagccggcggcaacaactccttcaaggtgcgaggcctcaaaacgatgtgtgtgggccactgatttctgattgcatgcaggacaaggagaagccgatggccgtgcgggcctctaacattctcgctgctcggggtatgtatattctcatgatgttaaaggcgcccatgctaacggtataatagctgtctccgatgccattcgaacagtacgcttgctcaaacgatctgcggatacatagatgaggggctaacaggaatatagtctttgggacccaggggtatggataagatggtgagtttatctcggatttttcttctatcagtatgctaatgtctctctagatccaaacggccaaaggacggaccatcatcgtatgcagcccaattcaatccgaacatatcagaagccacaactgaccccccgcagacaaacgatggaaacactatgttgaaggatatgagcgtgatgcaccccgctgcccgcatgcttgtcgacctgagtgcggcgcaggatgtcgaagctggtgatggaacaacatcagtggttgtcattgctggcagtctgctcggcgctgccgaaaagttgctaggcaagggccttcaccccactgttatcgcggaatctttccagagagccgccggtgctgccgttgagatcctccacaacatgtcccgtcctattaacctctccgatcgttctaccctccttcaagccgcttctacttcgctttcgtccaagatcgtgtcccagcactccggacttctgggcccgatggcagtcgactccgtcttgaaggtttgtgacccgaagaccgcagagaacgtggacttgcgggacatccgcatcgtgaagaaggttggcggcacaatcgaggatagcgagatggttgatggcgtggttttgaaccagcccgtgatcaagagcagtggtggccccacaagaatcgagaaggcgcggataggtctgatccaattccaactcagcccgcctaagccagacgtatgttaattcgctcctcaaactgttactggaacaagattgacaattagattctagatggagaaccaaatcgtggtgaacgactaccgccagatggacaagatcttgaaagaggagcgccaatacatgctcaatatggtcaagaagatccagaagactaagtgtaatgtccttctgattcagaagtccatcctccgtgacgccgtgaacgaactttccctgcacttcctttcccgtctcaagattctcgccatcaaggatatcgagcgcgatgaggtcgagttcctgtgcaagagtctcggctgcaagcccgtcgctaatgtcgactctttcactgaggacaagctcggcagtgccgacctcgtcgaggaagtgcagtcctccggtgctcgttacgtcaagatcaccggtatcaaggctcctctctcctcttacaaccagaccgtctcaattgtcgcgcgtggtgccaacagcctgattttggatgaagccgagcggtctttgcacgacgccctgtgtgtcattcgctgcctcgtcaagaagcgtgccatgatcgcaggtggtggtgctcccgagattgaagtggcccacctactcgccatgcgtgctcgtgagcttaccggcactgaggctatctgcttcaaggccttcgccgatgccatggaggtcatccccactactctggctgagaacgccggtcttaactccatcaaggttgtgactgaactgcgccaccgccacgcccagggccagcacaatgctggtgtcagcattcgcagcggtggtgtgaaggatgatatcacagaggagaatattctccaacccttgctggtcagcactagtgcgattgagctggccgcggagactgtgaagatgatcatgagaattgatgacattgctctgtcgcggtaaacgccctcggcggccgctagcgtgagctgtatgatggaaagcgatctaatcgtgacgagtaattaaaaaaaatatcccgttcctgcatagaatcactattggactatacactttctgtgcaatgtatatggtagaccgagatccctgcaatgctatcctcgcaagttttataataaaaagtgagactcagggcaagtatagatatactcgagggtgtcatattgacatgaaagatttaaaattggagaagtatggcctgaaatatatagagcaacactgcgctcaccaactgccatgagcagccaatgataccatggacattctgcagttacattagcgacaagtcttcgtgagaattgaactaagaactatcaatatctaacctaaaatgggcttgaataaggatattagatgctaaacaaatgaatagactctttgtccatgccaagaatggcctcggcctgtttcgcaagattcgccattcggaagccagccctcgaaagaatgacctctgcttttctatacattgtctcagtaattcggcgactataaatatatatacaatcacactcactgtcattgcaacagtgttgctggcgctcggctcgaattgctggcgataagagatagagtgacgatcgacgtcagctccgcctgctaactccgatcgacagccaccatgggaaagttcgaagatgaagggaactcagagtccgtaccattgactcgacaacggtcggaatccctcgcctcacaaatatccaccgactcgggcctctcgatttcctccgagtcatccatgaagaaccacaagggaggcaacacgctgccgatggaggaaggggaaggggacagataccgggatattgaagacggaggagaaactggcgcagatgagcctcttatatcaaaccggaagaaggcaggctcatccggtcgtctgcgccagatcgtctggttactggtgtttctgtgcgtcggtggctgggtgctctctttcgtgctgttcctcacgcagaagcgacccgataatgcggcgctctcgtctgcatcaaccgtggacgtccatgaaccaggcttggctactggtaataccagccacgggaaaccagtgacactgcaacaaatcttgagtggtacctggtctccgaagtctcatgcgatctcctggattgcaggcccgaacggcgaggatggtcttttggttgagcaggacgagaaaaaagacgcttttttgcaggtaaaagacatcagcggtaacaaagacggcgtcgatcatctcgagaccagagtgttgatgaagaaggggtatatttggtttgatggggaggccatcccaccggtcaagacgtggccaagtcctaacatgaaaaaggtcttggtcatgactgacactcagtccaattggaggcactcgtattttgggaaatattggatcttcgatgtggcaacgcagaaggccgaaccgctagatcccgggaacctgagtggacgtgtacagcttgcagcttggtcaccaacctctgatggggttgtctttgttcgtgagaacaacttatatttgcgtaagctggcctctttggaggtcatccctatcaccaaggatggcgacgagaacctcttctatggtgttccagactgggtgtacgaggaagaagtctttgcaggcaacaccggcacctggtggtctgatgatggcaagtttgtcgcattccttcgcacaaacgagtcagcagttcctgaatatcctattcaatacttcctttcacggccatcgggcaaacagccaccgcccggactcaaaaattaccccgaagtgaggcagatcaaatacccgaaacccggcagtccgaatccaattgtcaacctgcagttctacgatgtcgagaaaaatgaagttttctcgtttgacatgccagaggactttgtcgacgatgaaagaattatcatcgagattgtctgggcgtccgagggcaaggttttaatccgagagaccaaccgcgagagcgatgttgtgaagatctttgttatggacacaaaggcccgaactggcaagctggtgcggtcagatgatatcgcagctctggacggtggctgggttgagcctacacagtcgactcgggttattcctgctgaccccaaaaatggtcgaccacacgatggctatatcgacactgttatttatgaaggctatgatcacttggcttatttcacaccttttgataacccagagccggtgatattgaccaagggcaagtgggaagttgtcaacgcaccgtcagctgttgacctgaagaagggtctggtatacttcattgccacaaaggaggctccaactcagcgtcacctatattcggttaaattggatggctccgatcttcgacctctgacggatacatctgcacccggctttttcgatgtttcattctcccatggagccggctatggtttactcagctataaaggcccatcagtgccatggcaggccgtgatcaacacccaaggtgacgagattgacttgataaacctcatcgaggagaacgttgaactctctaagatggtcgaagagttcgcccttccaacggaggtgtacactaatgtaaccattgatggttacacgctccaggtcctagagcgccgccctccaaacttcaaccccgaaaagaaataccccgttcttttcttcctatatggtggaccaggatcgcaaacggtagaccgcaagttcacgatagacttccagacctatgttgcctccagtctgggctatattgtcgtcactgtggatgggcgaggaacaggtttcattgggagagaagcccgttgcgttgtccgtggtaatatcggccattatgaagctatggatcagatctcgacggccaagatctgggctagcaagagctacgtggatgaaagccgcatggccgtttggggctggagctacggtggctacatgaccttgaaagtccttgaacaagacgcaggcgagacgttccaatacggcatggccgtggcacccgtcactgattggaggttctatggtacgctccttgaatcattactgttcagtttgtttcccaacatgcacatactaacatcctccttcgtcatagactctatctatacagaacgttatatgcacacccccgagcacaacccctcgggctatgcaaatgcctccatcagtgatgtcatggccctaggccacagtgtccgatttttgatcatgcatggtgttgccgacgacaatgtccatcttcaaaatacccttgttttgatcgacaagctggatttgaggaatatcgacaactacgacatgcaggtcttccctgattcggatcatagtatacaattccaccgggcgcatgcgcttgtttatgaacgtaagttgattcccaacgcgcttccattcaatcgcttcccaaggttgggaaatgagatgacatgactaattgtgaatcaaggtctctcgagctggctcatcaatgcgttcaatggtgaatggcatcggaccgcgagtccgaaaccacaagagtcgacgtgaacgcagacttttgcttttttggaattatgtacacccttgggtatatattctactaaacacatatagctttgaattaaggaacaattgatgcatattatgattctgtattctcattaagactaagaatttatgatagaaggactgtagtcgctgaggtatgccacaatttgtcaacacgtcaacaaaattgataccagacaaaacatattaacagagggcttttgaaacatttcctatggttccttccaggaaccaagacaccgaataatgcatgtatgaacagaaacgcgaaaaatatacaggaatgaaatgcagtatgtgcaagtagggtaaggaaggaagggtgtgtgtatacaactcaaatcaagacgagcgactaggagagcgcgcgccaggagaaagaccgccagcgcgaaggaagtcctctctgttggcgacactgacatccgaatttcgataaggaaggtagtcttcacgctgcaagccacgcagctgttcccgaccgacagttgagacggagcgtgcgtaggactgaggacgagagagggtcggacgggcattcagcacagacagccgatgactggaggtccatatgggtgatttactacccggggacagcacggtcgtccttggcgcaaagacaggcagacgagcgaaggactcggtatccgtggagacattgctcatgctcatagccgagatgtcagacatgggacggtggtagccgccgcgactggggatatgggacatggaactgtagacggtggagataccggactgggcggacgagcgccaggagttcaccgcgtcgcgcgggatggtgatgatctcttcgtcgacgccggtctcgatggcggctgccacgtcggcgggctcgatcgggtcgcctgctgcgcggctggccatcatcttggccgacttgccaatccacaacatctgctcgtgctcgcggaggtaccggtcgccactgaaagatttctggacaatcgtgcgggtcatcatgccgagtttgcgacggtgctcgctcttctcgtacatacggcgggtgatggctgtgacttcttcaggggtggggtgggaagtcaagactggggcggggcttgtgtcttcgctgtgtttgctccattcgccaagcatggcaagcatgccgatttgggcctttgccagggcgagcgcgtcgtttggtgcgacaacggcactgaagcgggagaagtcatctgggtcgctgaggactcgaagggaagcaccgacgtcagtgcagacgacgggagctccagtcagagcagcctctcccagggcgagaggaagaccttcagacagagatgaattcaagaaaagccaggtgttctccaggaccttcatggggtcggcagttccgcggagtgtgactctgccacgaagaccctttgatgcgatgatctcttgacactcagtagagtaagtcggagccttgtcaatagcgccatagatgtccaggtggtactcgtcgaacttccactggttgatgatgatatccgcagcgagaagggcagtcttgatgtccttggcataccaaacgtgggataacatggtcactgtcggacgctcggatttgatttccttgaccggagagaacttctgcatgtcagtgattccgttgacgacaggatcgatctttctgcggaaagtgtttcggtgctcaatcgtgccctggcaggtaccaatctcgacctcccaaccggggttgaagaagtcggcacagggaaggaggatgtctgcgtggtgaagggtcaagacggaggtaattcgcatcaatccaagtagcgcgtttcgaacaaatggcgagagcttgcacaaggcagatgacagacagagattggtttcacgccaactgatggcgtgatcccaaatctgcaaggtacagttgcgcttgatcttgcatacaacaccgtaagaggcgctgacactgtgatgtgaggcttggaaggttgaaggaatcttttcaggaaccgggatcgagaagatgaagagatagcggtaccagagctccagggcgacatcgagagatgtcaaggtaggaagctcagtgtcgaaccactcggatgacgggatggtgtttggcatttcctgggtcagccacaactcacgccagctctgtttcacaatttcagtgttccacacctgagtccaatgacgggactcctggaagtatgtgttcagattcacaagtgctcgagtcgcttggtggatatcagccttcgagagatgaactgcacgggcacccttaaccaaagctgtcagaatcggaatgaagttcatcttgatgtcgtactcgctcgcggaggtaacattgtccacctcagcatccagcttgttgtggaacaaaccgtgagttggagtgaggaagtccataccccaaagcgggatgagcttcagagactggatgttctgttcggtctgatgctttggaacaccgaaatcgttggcagactcgcaaatcatgtgccatttgatggttcgcagagagttaatcatatctcgtcgacaggcagagacaccaccaccttcattaggccaggtaccgttgtcggccgccatgacatggagcgtcttttcggtatcggtgccaaagttcttggagcgagtgttaacaacagcatctcctccagggccaaagttgagcaaatcggtgagcttaacggcgagtggggtccagctggaaatgttgtcgtccagatccgcactggccatgatcgcatcagcgcggagatccacgtatttctttgcagccgcgagatttccccagtcacggctgcgccagtaagggtgaagaaccttatctctgcgcaggatacggtcatccatccagcgaacgataattgcatcgaagtcaacacgatccttccacgccttccacatcaaggagcgagctcgagaagttgacataacaaagcgcttcttcgtgaggcccagtgtccgggtaaggaaagttgactggagactatcgcagtaaacaaaggggttatcatgcacaaaactggtatactttggcttggagagtacacccagataatcgtgctcaatcatcggcggagtctgcatcttctgcccattgatagtggtaaagatggtgggatggaacttgtgatcatacaaccaacgactttcataaacatcggcgccttggacaaagctggcctcggttaccttggagtgaggaatccagcgttcaaccttctcgggatggcgacgcggaggcgcacaccaagacacagtacagctgatgtgggacaagacaaattcggctcgcaacagttcatcaccgaaacgggggttcttgcgatagtggtacttgaagcggataagattgccatccttcatgtacgaaccagattcgataagacccttgcggttgtactggacgctttgcagatggttcgctcctgacacgcaacgtcgtcctagcggaatgcggtttgaggatttgctaagtttgaagctcttctttgtcggagatcggtagtcgtagtggtattcgttgatcactttgccgtccttgaactcctgcttgaccagaagcaacatctcacccgaaaaggtactgacgaacttcagggatttgacctccttgggctcagtgctatgctcgccagcgtaatggtagatcttgaaagtgccatcaatctcgtggtgcctgaatgctgtaaaggtgccgtcctgactctggacaatgatccggctctttttgatatggatcgtcatgcccttagtctcttcccacagccgcttgacatttttgcggccatggaagaggaagaaggacaagcccaagtcttgaacgagcttggaatagacccagaccatattcaataagaagacggttggcacacggacaacgctcggaaggtccttggtgacatgattgaactctctctggaattccggatctgcgactgaagctaccacacagaacttgataattgttcccagcttgtggtaaatgtagctagctggtgatcggagtagcgacaatgcgaccgggagcttccgaggtatataggaaatgtacttcgaagtctcggatactttgggaagagcggtttctccagttccccagtgagcatagtcgagaatgctaactgcagtggctgcaccaagattgcaacgagcaacatggatattgaggtcatcagtatcgaatgtgcaaagatttcgctggagccattggcgctggctattggaaaggctgcactgttgacccaagcaacgcttcagcagcacatcccgaacctcgtttggcagcttgtcccaatggagatcagcctcgaagccaaggcaaagctgccgaaggagttccttcttagcccagcatacgaccgtatgtgtgttggcctcctcacgaagctgtcgagccattgtgtgggttactccaccggagacaatcgatcccgccaatgatgcatactcatgaggaacgcccagcataagctctgtgacggcatgaagcaatgtttcagcaataatttgacagtttgcgctgatatcgagacgctcgtctaggagccctcccacggtgatggccaacttcaattggtttccagtactgcagctgagagctcgaatgccgggaccgagagagccagcagaaacaagctcgatgacaatgtcgcccttctcccatgatgagatggcggtgttgataatattcttggagcaggggaacgcctcttcgatcctaagttcttctctgcaagacaacatagcattcttgatttcagcaccaggatggacacctggattgagcctgaatcgggaatcggaaggaagcagtgaatagctttcgaagaaagtctggagctcttgctgggaccattcggggtccgaccagggtgtcgtaaacgcatggaaagtgcggccaagttccaccggagagtccactttgtgtggcatacccattttggcattccaaatcgagaggaaggcaacagtccaggtagcagagccgagtccaatgatctgcgagtacagcgactccggccgacagactttgagcgcgataccgattggcaatccgacacagataccaatgatgagaggtttcagcgcatgagggccagtgaagatctttgtgtattggtaccagatcaaaccagtgtaggcgagaacgtaggagaagaaaacaatcatgccttcaaccggagtttggaaggtccaaatgagggcagtagcaagcgcaagactccagacatgccacaagaggaatctgaaaaggacccgccagtataccttgcgtctcagttggatctcttgtttctgagcgagccgaatgtcttttgcagatctgacggaaataggagctttgctaccgagggcatcatggagctcctgggctttggtatcaataagcacggctccgatcaaatagtaggcaagggcgaagccaacagccattcgattagcattattcatctcagcagtgaacttaggatcaggcaacccgctagggaggagaccaaccatgcgattgccactcagcagttgtgcccatttgtcaagaagcgcaagcacaaagtacagaacaccacatcccatctctttgctcgattgacgccaatgaacaaatgcgttgtgcagacgaagacctttctgagagttacgcagggtgtcaagtgcgaccttggtttgaatattccagccagaactgaacggaatcggcctcggaacatctgcatggcgacaataccagtcgagaaggaaattggttgactcccagtcccgggcaagctctacgaccattttatctttggatgtcttggagaaagttccacgctttgtctgagccaagacgtccttaaacagtgcttctctagccagcttgagggcagccgggtcactcatgttcgcgaatactttctcgtcatcatttccataggcagtgagataccacttgcggatctcagtatcatcggtgcggcgcacggattggtaccaagtgacccattttgaggtaaccgaacgaagagagagcaagagcacaccaatgaagacatagataacggcgagatagatagccgagtcgtggccagtccaggtcgtgatgatcggcgacacgaataggatcggaatggacataatgattgacttgcgaccagacaagaaagacgtaccagggtaactgaagcttgcaagggaggcgaaagtcgagaagtaggttgtcagagcgactaggtagaggtagaagacgataccagcgcgaggacctcgaacacctgaaatggcaacgaagccgatcaagccagcggccacagtgaaggcaataccagcgatcaggcgaatgagaacgaacatgttcgctgctgcaaaagccatcgaaatgaggtagtacgggccaccacatgcaatccaggtaccaattacaccggaaagcagcagagcgatcatcagcgccatagttgcactgtcctgttcataatcagtcatggcagcagacagatagagcccacggccaatcaaggtaagcaagacaatatcaatcagagctggaatagcgaagacactcaagaatgtgaattgctggtatgcaggcataaccttaggcttatcatcggggttgacatcaatctgagctccggcgtaggatgtagcgagctccggagcaccgttaatccagtttggtggctgatggtctccatagtaagctctgaaccggtcggatagcaacttcccgaaaacgctgggagatacgtcgaagtatgcttcacatcgcgatccaagggcaaatgactctgcgaaggcggcggcctgatcggtatggctgttgaataggggattccgatcagtcacttctgtgtaaatctcatcgaaggctccctgtcttgcggcactaaaaagcgcaagagccatcatatccacgtatgcgtcaacggagccaccttgaagaagcgagcagagaccattggtaatggcggcaaggtcatcctcacggcggtaccgcaaaacatcggagagcacactgtcggcctgatggaaaagatcaagacagacatcgagagatgggtatgtgcatccttgatccaggtaccagttgatacgcgacctgatcaaatcatcaggaggggtagatttgctgagatacccaaccgtgttcagtgctttcaactgagcaaaagaaggagcatctaccagttgcttgcgaatgtatgcgcagatggctacagatagctcgctgtgagaatcggtcagagagaggtgctgcaagagaagtaggcgctcttcagggctgagaacatcgatatcttgtatcagtcgacggggaaggccagtatcgcgagacacgtcctgggaccaggttgcgaaggtcgcctcagcctcgaggcaaacatgccgagggaatccctttgccgagaggaaggtgtgaagaatagttccagccaggccttgcgcatttttggacacataaatctcgataccatcatgatccatatcgaaaacggcccaaaatcggacatcggagctcttgcgcagaccagaatctagacagagattcacgtgcaactgatcattggatgcccagttcgaaagttccttgatggtgttggccaaatgttctccatcctcagagagatccagagagtcatagaatttactcaaaaggactccaatactttggattttgggtttcgggacgggatgaagaagactgagagacttgagacgttgttgagattggacgatttctgcaaaggccagtggggtcgcgtctgaaccgagagggaagcaaccgagcgagttgtaggccagccctgacatggagatagagagaggactgccctgcgacttgacctgtgcaacccattcaggaggatcacgcaggcgaccagtcgggctatcgggggccttggagtcgtattccgatgacttcagtagcgcatcaatggcagggaaaagtggcttgagaatatcccagccaggcttgttatccggggaaggcattatgttcaggttgccacgccaggtatcatgagctttcatcatttctgcttccttcaaccaaccgaacgcgggaagaggttcgagagtcgcgacgttaagatccgcattgtgaagagcagcttcggtgccgatccaggtaattgcactgtaaaaaccgcaccattggatagacctgcgcactatggcattaggaataatgacattatcgtcgatggtttcccaggacatcacgacaaagtctctcatgcaagattcagaaacgaaagccttgagtgttggttggagtgcgaccatttggaaataatcccgcttttcgccttcaggcatgatgctagcgtttcgaatgaccaaacccgccacggcactgctctgaacggcctttcggtctttcaagaaatgcggtggctcagtttcgagatagactgccaggccgagaccgctgatggcctcgaggagctttctgcgagcggtaggacggagcacatcttcccaatttgcgaggagaacaccggaaaacgcggtatcatggaatccgcttgtgagcagttcctcgatcttttcgatgacggccaaggctgatggatttggaggaaggattttcccgaaatcaatacgtccgagtacccggctgcgctcgtgtctggaaatagctctggcgacacctgactggaatggatccacaaccaagacatcccattcttgcaaaagtctttcttgcgagacggtaggtgggttttcgaagcttcctaggtatactccgaagctcgtgggcttgcccgcgcacggacgtctctcgatcaagttgagttctcggttggctagctgggcgatacggttggatacactcgcagggaaggtgtctggtagcggtctcgactaaatagactggaattagtatatagagcagaggggaggagcttgtcggtgttcataccttatagtatttgataaatctccttcctccggaatatacaattgaggcagagccaatggcgactgtacatatcaacactccaatgtacatctaagggagatggtcagcatatctttctttgtttctcaacgagagcgccaaaggtcaagttgtaaagaggaccaggatcaacatacgaattgccaccaatgttctttcatgccattccagccaagaggatctggcttgaatggaagatattctaccatgacgtcgggaggttgagtcctcgactcgatgtgtctttgagcgcaatataagaggcacgaggttagaataaccggccaagtggagatgcgacttcaaatgcaaatgcttataatgacatgcttaaacgagtgactgctgtgttcagcgaaaagccaagatgtcgatgtcaagaaaagagagcaccggggagctcaagtgtcgacaaggtgataaggtaaaagattagtgggggaagaatggctaaagtgaatatccacttctccaagccgcatcagtcaaatacaacaagacaattttgcctcccaggatttcccttgttcaattgtcaggggcaggaaaaacggaaagaaaattaaaagaaaaaatgtgtatacggggtagcttcgcctcttttggaccgtttaggatagaaaacaagtgtctaggcggttagtgaggtagagatctctgaaaggcaaaaatagcacacactaaagttttcgaacgcaaaagaataagctaacagatgcacggctggctgaccgatggaacagacccggtggagccagcgtagtatggatagcagatatgttgccatgtgtgccaaagccatgcgactcatatcgtggcaattatactacccgatgggccttggctgtttctcccactgtgttccaagggtctaattgaacatatcatatcaagaatgaatatgtcgtgtttccctcgagatgtatcggatttcgcctagttagtttgtagggcagttatgcacgggctagagcatcatatcatttcagcgaacaaaactcgatgtcttggcaaaggattataattaaaataattaactcaaagacggaaaagaaaataaatagaaaagattagaatgcaaaaagaaaaggaaaagaagaaaagaaaaaagaaatacaggaaaaagaacttgaaacccgaaatcggacaatccatacggtgtatgaaccggtaaatgaaaattaccccgtatctgcaagaaaccacgtaattacaagtatccgagtagcccgaaataccgtatacgccatacacacgctgtaccccgtattcagctcagacatgcagtgccttgttcttccccttccccacatcaagttctggacttgaccagtctgttcccctgaaggtaaggttcgttcctcgggaataatgcaatgtgttgtcggatcttttagccctgctatggagttcttcatgtctcgcttaccttcaatctgcctagccttgcttttgtcttttcttattattatttttagcccaaagtcgaaacaagaagcgaaaacgagaagagatttctccatgtctcaaccaatccccaatagattccattcctgaaccgatctcaggccccccggaaaagattaaacctatcaacgccagatggagactcgtataaactggatttgccttgagatccatgcgagattactccgtagctccgggattaactaggcacaattggcgataggccttggattgaacctcccgttttactccacaaacaatatactataagagctgatgatcatgcacatgtgggtaaagagctgcaagctaattcattcgttcattatcttccgtattctattttcattttctcagctgtcagttgttaattgcagacctgcatactgtgtgaccttccccatctagaaataggtcaggatcgtcatggttgccgtgccagtctgggccttgaaggtcgcatgctactacgcatttataacatgcgacactgcccccggtgtttggcctgagaacaccccgactgtcattgcctatcatcctccggtctcgactccttctagtacttctagcagtactgctgaagtgagctccactgcggtcgctacttctacactctcgttcacttcctctgcctctgtcccggctctgtcctctatcgttactggcagtttgcccacagttgcaccgaccaccactgcagcctccaccttcgttactttcaccacttcgagctcaatcgtcgactctgcttcggcatcagtcactgtcactgtcccctccggttcttccagcgtcctgactcagagtgggtcgtcgtctgtttcatcggcctcttccagctctgctgtttcgtctgcctcaaccgttgttgccagcagctcggcttcttcttctcctgtttctagtgctacttcaagtgctagttcttcgtcaatcgtttcaccgtctgaaagttcttcagtcagctcgcccgcctcgtctactgttcccagcagcccggcttcttcatcgcttgtctcaagtgtcacttcttcatcggtagtttcatcttccgcaagctcttcggtcagctctacctcgaccgctgttcctagcagctcggcttcctcgtcagctgcttcaagtgctgcttcttcgccagcagtttcgtctcctggaagctcttccatcagctcagcctcaaccgctattcctagcagctcagcttcttcgtcacctgcttcaagtgctacttcttcctcggtgattacgccttccggaagctcttccgttagctcagtcgttgttcccagcagctcagcttcttcgtcacctgcttcaagtgctacttcttcctcggtgatttcgccttccggaagctcttccgttagttcaatcgctgttccaagcacctcggcttcgtctgcttcgagtgttgcttcttcgtcggcagtttcatctcctggaagctcttccatcagctcagcctcaaccgctgtttctagtagcttggcttcttcgtcagccgtctcaagtgctacttcttcgtcagttgtttcgtctgcatctgtttccacaagtgcttctttgactaccccaatcatgtcgtctaccctcatctcaatctcggcttctgcaaccgcaagtgccactccgcttagccatgctgccgttgcagctgaaattctgattattgccagagatgctgcctctgctggtgtggccagctctggtctcaatggatacggtatcccattctccactctgattgttccctctgctggtgtcgaacttcccgaactcaatggtaccgccggaggaaacttcggtggtattgtcgttgcctctgaagtcagctatgactatggtaccctgggcttccagagtgccctgaccaccgatcagtggaaccagctatatgcttaccagcttgaatatggtgtccgtatggtccaatacgatgtctacccgggtcccaactatggcgcatctgctatcggcggatgctgtgacggcgttgaacaacttatctccctcactgatactagtgaattccccacatctggtctgaagactggcgcaggtatcagcaccactggtctatggcactaccctgcgactatcagcaacaccacctcgaccaagcagtttgccgcgtttgcccccaccacaggcttcgagactgagagtgtcgccggtgtgatcaacgacttcgatggccgtcagcagatggccttcttcattggtttcgacactacctggagttctacatccagctacctgcagcacgcatggatcacctggattacccgcggtctgcacgccggataccgtcgtgtcaacctgaatacccagattgatgacatgttcctcgagactgatatttactcgcccgctggtaccaccttccgtattcgcgccgaggatttgaccaacattgcctcctggattgataccatcaatgccaagttgcccgctggcagttcttactttgttgaagtcggccacaacggtaacggaaacatcgagaacgcttccgatacctcggatgctggctgggatacttgcggagctgccatcgagtatgattcgcctttggacactcccctcgagtggatcaagcctcttggaactggcactgatctgtggcccgccacccctactgcttacgactgggaagctacttgcactgtcatggatgagctcctggcatggtggaccaccgaaagcaacctcaacaagttcggccacatctcccacactttcactcacgaggagcaggacaatgccacctacagcgatatctacaaggagatcagcttcaaccaggcttggctcaagcaggtcggtatcgacaaggccaccaagttcacttccaacggaatcattccccctgccatcactggtctgcacaatggcgatgcccttcaggcctggtgggataacggcattgttaactgtgttggtgacaacacccgctctgcccttctgaaccaggagaacgacatgtggcctcttttcacaaccgttgccaacaacggtttcgatggtatgcaggtcaaccctcgttgggcctctcgcatctactacaactgcgacactcctgactgcaccgtcgcggaatggattgccacctctgctggtgttggtggcttccaggacctcctggacatcgagaaggccgagactatgcgtcacttcttcggtctcttccacgatccttacatgttccaccaggccaatctccgcaacgctgatgttgaccccatcaccatcaacggtgttgctgagaagtactccattatgcaggcttgggttgagacccaggtccaggagttcatccgcctggctgaatggcccgtcgtcaccctcacccaccaggaggtaagataaatcctatccaatacgctacaattcgtttcatgtgctaaccttcatagatgtctgctgccttccttgcccgtttcaaccgtgacaagtgcggctactctttgagctacgccactagcaaccagaagatcactgccgtcactgtctctgccactggcaacacctgcactgaccctatcccggttactttccctgttgctcctaccagcaccctgggcttcgctaccgagcagctcggtgctgaccctctgaccgtctgggttgagctcactggctcccccgttactttcactctttccacccccatttccttttaggatgtttcaaagatgattgaccagtctgccttcatttgacaggtcgatgcactttgcatcttttggcttttgttgatcgtccatcgctctcattcatcttgtggatatctctttagatgtcaataatggtttttatatatgtgaaggaaaaaacagcccttgtctttctgttgatacgaatattgaatgtcctgtattttaataatgcctggaaatatcatgtatactatatgatatacaatgatgctttccgaatggtcttcatacttcagtagtgtacaatataaaattagggctcaatctgtgcagagtagtaaacatcattcttcgtaaaaagcaacacaagcacaagtcctcgcatcctcggtactactctccgacatgtcatctggcggtctggcggtgccatcaataattcgcgctgcaggtccggggtgacaaagtctgcaacggttatacgagccaagggatttcctgatccgactgatccggcgcaaggcatggaaaagacttccagcgcatttcgcacggtcatgcaccccataccccaaaccaagaaaacccaaaaaatatgatttccacggatgagactaagtccaaaatcaaatcaatcgatcgtggcaaaaacaaacatccatggaccccgtttactccatacggaccagcccaagcaccagaaagcacagtgtagaaagcaggtttagagcctaacttgtctcacaaaccactctatcaccccacccaaccgaggacgccatccgggcaatcgatctggtgccaagtacactcggaaaataaagatcgtgtctcagaagccggaggggtccggtggatgtaaactagtgtaaacgcaagtggctgctgtaaatgtctgagatataccggtacgcacagagtatattcgaaattctacctagatcgtattcctgcggggtgaaggttgtagggttggcatggggcaatgtgaccccgtcatcagggtccagacctacgctacagcggggaagcatagatgttgtattttgtatacgaggggaccaatgcagccgttgcataggaactactcgattgggtaacaaggaggctcaatactaattttggatccatggatggcaccatttcggtgatatccgcttgaatacggagaaggttcctgggcattaagccacccggtcacggatttaatgtgctttagtccgggctccgtactttggactttgtgctggggtcatgtagtgatcaagaataatgtatgaataatgtatgttgtatgtcatgtaaccctccctgcttggatgaatttgggttttggagctcattctgacttctgctgctactgttgctttcgttcttttattcctgactatccctagcagcggccggtgccaggggcaaatgttacgatagatagaatgcgctagaataaaaatcccttagcgtgtatgtattctaagcgagagatattgacagagtcaccatttgatgacttgtcaaacagcgaacactggaaacggttaagcgcgatcttggcaagggctcgaaatttctgtctcgggtgcaatatagaaacgagactaacgatctcgggacttcgtataaagtcccgtggacctgtttcggttagcgggtgtggcgtccagagatttgcgccaaagaaaaatcaggcgatcgggttacatctggactagcgccatcggttgtactttttctctggtagtctattttagcgtcgaaggtggagagagcgggtcatggaggacgattcaacaaaaaaaaagtccaattcgaaacatccaacatagaataggcaaacggggtaatagtaacaatagcattgcatgatattatgggttactaccagtgttgaatactcgaggatagatgcttcgttattaaactagatctgcacataagcgtcatgcagagaagatttcaaagcatcagatgatagcccaacaggtcggcactagggtttttaaagtgactgattatcgctgtcagaagtttgtccactttagttagggctagctcgatacataccggcatttagggggatatctcgggttggtatttgcaaacccgtcttacctcggattggtaattacggggataaaatacaacaataccattttcgtgacaaaaaaaactcaactccgatttcgcgattctagactttaacgctaaggggcttgccagcacatgcatctatccgcttggtttattggcaatgttctgggaacactggaagcgcagggactttcggtctcccctcgaatcctgatgctgtccactttgtttaatgtatacaacctacaacatatatggaaataaatagccagccttggcagaccgagacttcccttttttcccttcatctattttaggcgacagatcactctcttcatccatcttggcaatttaaaattggttgccaacccctaactaagcttccatgggttgccattatctcttctcgtatacggtagttcacttatagtgtacagtaagacgatatagatcgcctgatcacatgagcagatcagatcagtaggttccaccggatctttagttttcgccccttggacttttccagtggagtcctgaccgccctcgccctctatagccctttaggcatcctcgttttcctaccaattgatcaccacctcccttgcccgttcgagtattttcagggtcttccgtccattttctgccgcgatccaaggctgagctttgcttataacgtccaggtttttccgtaccctgggagatctccaaccagcgctctgggcccttgactttgagcttaaagatgcctatctcccgaattagtgcctgctgatcacttcgtctcttcttttccctccttggccttccccatacaccttcattatatacaactaccccgcgattttgggttatctcaaccttattacacactaaatttctctcgttttatctctcatttatctctcagttcacagtccaccttaatcggtgaaatgtcgtccaagacgggctggtgggcttggtccaccaagaagaaggtccttatccttggatctatcgctcttgtcatcattgctctaggtgtcggtctaggtgccggactaggagttggtcttcatcatggcgaaggcgatgataatgataacgacaacggcggttccggcacaggttccggaggcaccggttccaatacgacaacaccaacaaacacaaccgtgtggcagccagctgttggcaccaagtggcagattatactaaaggccgacgatggcgaaccagtcaccacctcagtggacgcgcccatctacgacattgatctgttcgacaacaacaaaaccgtcatcgccgctctccagaaaaagggtcgcaaagtgatctgctacttctctgccggctcgtacgagaactggcgtcctgacgccagcgactttctcgcctcagataagggcaagaacctcgacggatggcccggcgagaaatggctgaacgtctcgtcccccaacgtgcgcaaaatcatgcaggcgcgtctcgatatcgccgtgaccaaaggctgtgacggtgtcgaccctgacaacatcgacgggtacgacaacaccaacggacttgatctcaccgaggcccaggctatcgactatgtgaactggcttgctgcccagtcccacaagcgcggtctctccgttgggttgaagaacggcggaggcattatcgactctgtcattgataacatgcagtggtgcgtcaatgagcagtgtgctgagtacgaggagtgtgatacctatgcggccttcattgaggcggacaagcctgtcttccacatcgagtaccccaagggcgatagtaccaacaataacaagtccgtgacaaccagccaggcgaatgctgcttgtgatgccaacagcgctggcaatttttcgactgttatcaagaacatggacttggacaattgggttgaatactgcccttgaatattggatactgttcgtgaataccgcctgtttgaggccttgtgcagagtgggctcgtcatctaatttggagtttgtcattgcatgtataagtactagacgtgatactttcggcatcatcattcatagcttccatcatatttcagcgtgtattaattggtcttgagaggtgaaagaagtaaattggcaactagtcacaaagtacacgcctggacacccaagaacccctggaacgcactcgtcatgtcagcacatatttcacgaacagcaccttccctccgtgtcaaattcatcacataaattccatcaagaccacgccatcggctcaaattgccttcggatcacatcaccctcaatagacggcaatgaagtgcaccacacggcacagcaactcacaagcccaaagaagcgaaaccaaaaacgccattttgagaacacagcacgcccattacaatagtccagcccaacatgagcacataatcggcatgttctacctatttaagcccgctagcctcagaacagtcacccgacatcccgagttcccttcccgaggttttcccaagatagtactatgcgctgtctccgtactcagctcctcctcacccactctatcccagctcgcacctgctctgggcaccggctctaaataatcaccccatctcaaagcaacgaccagcagcgccatcgtcggcgactcctcttatttacagccactgcatacccataagcaatagtctgcagtggctgtggctgtggctactgcgattagtggaatattatctccgggtcttccgtgcgcccgggttattcatggcgtgacatgatggagagattgggcgaggttactccgtactttactttactcaggcctggcttttgtggcggatcagccatccgtcaatagcggttatttttctttttacttacaacacggggtatcggacgttgtttatggcggaagtgttgaaatacacggatacatatacgtccgacccgaataactagtatgtgcatgtaggtaacagggacttgattccagtcctattttttccctgcatcttatttcgccaccgtatgtataattagagactagtagttcgttgtttctagactctggagcaaacaaggcaattaattacaaatacgctcttgtctaattggcctcatgaaacaaatcgggcattttagcgcactgggcgggcatgggatttcccaatggagacggacgttagattggtcttggcggtcttggcacatgaatacatcggagcgggtcgaagcgctagattgctctgattggttaggtttgagagttcattcaatattcagttaagttcgggtcgagcccctggggaagtggatcatccggtaatttttcgatcgtgtttgtgtattgtggaaattttcgaagtttcattacatacatacatacgagagtgttgatatcgttatttacgggtattttatgtgtcaacaatcagccatcgagtttattttccgccattgatctgtttgaggctgtgctacttatggacatatcataactcaaaaatcctaatgggggatcccttgcataagacccctgtggctggaacttaagtcacacgtagcgtgctactatttgagataggtacgttgtactatttttcacaatgtgctatatttcataccaattgcgagaaagaaagccgaatagtccaggatccagaatccaaaatcaagaatctcctccgcaaaggcgcttatctctagcatcaaccacattttgactgggttcgcatagaaaaaatttgcatatcgcacggccgatctcggtacttggtactccgtactccgtcggtgaacacgaggatactacagctccccagtccccgacgctcactcccgacgggaataacaatatcaattggccagtaatacgctccctttcggcctgtttttttttcccctctccgaaactggaacccggtccaacccggccagaacccacgtgtaggtatactatacccgcctaccaataacgcgcgaaccttggaacctaacctgtctcgcgcgtggtgcagcagcaagaaccaagggcgctaagatcggctacccgagtggctcgcccagataatagatctaccccttgttcctgagtggctgggtatttgtacctgtgtgtatggaactatgtgcaccctccacttgtttacattgatgtctatattgtactccgctctgtgcaaatctctgcaacgcgacccagggctgctatattaaaactaacgggtggcttgtggcttggaagacgcaatgcctcgatttggtaatgggttatactaagcgaggatatatattcaagagatgactgccttcgacccatggttgaaccaaactaggcatgaatagcctcgattgaaatgcgcgatttgaatcggtggcttttggaaggaccaaggcgcgcgccatgcgagctgaacctcaaactcggatggagacatgtatggagacctggatggatatgctggcgcgaaccgttcggaatttatttgttcagattcggaccgtgtccacccatgcatgttcgtgtagctgatcaagccgcagccaaacccaccgttgttcattagttttcccacttttgtgctgttagcgcccccagcgatcgactagttctagtgccaataatgcaatttattcagatctagctcctatggagtcgaacggccatggaagacaggactgattggctatttctctacagttttagtcagttctccccagcggctaccgggcgcaccgtagccaagagaggggatcgaaaaaaaaaaaaaaaaacctccgaaatacccggccatgccacgagctacgtatgtagttagtggcttccgccaccggcgctcgggttcaggggtatggctggagttttacaggtacggctgaagagcaagggtggggtgggcaggacggtttcccaaaactgcttctcggaccgagctaccagggaagaacctagtttctccggaggcggagatgcacgcaaaatcatctctaggcagaggatgaatattgctcgtcactgtggtattgtacattgcgccggggaccggggcgggggacggtggaaaggttcattgaaattgaaattgtcagccatgttgtcattgatgtaacaacatacgacagcatggttcctggaacatgaccccgttggtataggacaggtcgggtttggaattcggtatagccgcagttgcacacgttaaacctgcagacggagccctctgtacgttgctcatgttccaacgcagcgttgtatccggggactgagtttgccctatgtatagcgatgatctaactatgccaacggtaaatgctaatacccgacgtctgttgtctagtctgtctcactactgtttcagtccttggtctctttacaccatctgagacgattacgttggcttatattaatagctcagttctgtctcaagatgttccagttgaatatatcccaaacttgagtaaagcacgatgtccctcgttaattgaaacgttgtgtgttgcagggttattttgggagtatttccgggcttggatggcattggttggcctacaagacgccatatgcatgcctcatctcatctcatagatcgatcggatgggcggtaactcagacaatattccaaagaatcgaatggtctaaatcgagatccagaaaaggaaggcgtttgcatttccttgttgtcatgctgtcatgttgtaaacgttgtcaacattgaagttaaatcaagccacatcaggttgagccacgtttaacctatacggagcactctatgcctcgtatcaagctggccctacaactagaacccactctcggattttaatatatccctatactccgtgatccaaccatacttttgcgttgccacatgtttcaattgacaggtacttgattagtggggtttagttgtatccatggtattgtggtattctactcttggcgaaaggccgaaaggaaaagaaacagaaaaataccacaatacatactggtaatgtattacccacctgactccaccttgacctaaaaagtatagctcagctcacttcaaacaaagacggcttgaaaggatagacggggaaagagaaaacttttattagatggactaaaatgtggtctgaaaaccaactcgtagaatcattaaaccaaatgagtgaaaacatgctagctatccccaaaaaatatgtgcacatactcgcttgatccaatttacatcaccagtgcacatgaactaaagcaagtaatccaaagtagaaatccaaatcctaagctgccatcaggtcgacgaactcagtccacttagacccaaaggaggcataatagttcgtgctcagatgggtgatgtagatctcatccgcgacctttcgcacctgcttgaccagactgcgaagatccttgccctcgaccgactcaggcaccgagtggacgatggcgcaaagttgggtacgattgctgtccgagatgctgctgaacagcttagcgccttgccgttcccggaacgtgctgtaggcggcttcgaacacaacggttgaatcagctgtagccaggtaccgagaatccgggacagcgccggggttatggacaacctgatagttttcgttagctcaatggacttcgcctatgtatcccagatggggaacacatggtgatgcaggccggggtggaatatgcggcgttggaatagaattcaatagagccatagtttggcttgtgcatggcccgacgggagggaaaacggaaaaacagataaaacaaataaagaaacgcggatatagggcgacgatgatgcgagacaggggtggtatggtatggggcagtccataagtgtaaagtaaaaacattacagtactcacaaattgatcagggccaagagccttgagacccttaacgaaatctgtgagcccttgcagatacgtcaaggtttgagcttcgtattgttgaggagtttcatcgaagaagattccgcgaaccgcaaggttggggtcggaggaattagtcggccagtccgcataggtctgaatatccttgcgaacctcagaagcattgcgctttccataggaggtatacacatagcccaacacccgcacattgtcgtacgcagtgagtttggggatctcgcgcgtgtaattgccatccgggagagagtcagggccgggaccatttcctggattgattacgacggtaaagttgacatcggggtgggcggatatcctgtggcgttcagcgactgtttttctgtatttttcctttcttttctaatttgtatataacggcgcagcataatgtggctggctaccaggatagcaatttggggagagaaaagaaaggataaaaagggtttagaaacatacacattttccagcggagcccacgcctcaggagcagggtatacgtagagtggaacgaacaccttcgccttcggacccatgctatttttcttgtggagggtagtgaccacaacggaggggacaacggcgacaataatcacaatcaggaccacaattgccaagatgaaacgagacaacttcgacttcaggcacgtccggttgctcacgtgtttctcagtagacataatgggggatttatagagagaaagttgaaaagaatgaaagtggattcgcgaacagcgccggttacatatgaacgtgaatttttcagagcatggctgtctgaaaaaaaaaccaaaatggaaacaggttgatcaacacgacctaaggcttggaccctacggtcgatggatctggggcgaccagatgcagtaaggtgtcttggccaagacgtcgaaaaaagaaccgaaatagagcaaaatcgaaagaaaagatttaataaagaaaaagcgcgaaagaataaagaaatacaagaataattccattattatactagctcgagaagccctgacgtactggtacggagcacggagtaaagatagaggcagttagggcatgcgaatgatatcccaaggtccagccgcatgtctggcccaccaaggggcatgcctggttctgttccagttcattgtgccccctcttgcactcgctttgtgcttttttttttttttatttccgtttatacttaggtccttttctttctttttccttttatttttgccgggggcccgtgctgaatcctcattcgtcaaggaagatggcataatatatgaactcaaacagaggatccgatcgagcaacgcaggtacctcgcttgttttgtataaaaccttggtggagggcccaccgaagaatcgggatatcttagtctggtcatataaaaacatagatcattttctctctttgttcgcagcgatagcataccttccaaggttacctggcattcatcgtcaacttcccatcatgattgctccaacatcattctcctcgtcgagatccgacagtcctcataggtctgatgcaagcagtcctgtgcagtctcccatcgccctggatacacctgtaacagaggctggagacccattcgacaatctccatgacttgttgcgcagagtccctttccagagccacattctggtcactggtggcctcggtttcattggtagtcacaccacgcttgagctgctcaaggcaaactataacgtcattgtgatcgacaatcttagcaatgcattcgagaatgtgttcgatcgtatcagcctcttggccaagaagcaccacgagaggaatggaacgaagatgccatctctgcggttgcatgcacacgattatcgtgacgccaaagctcttcagccgctgcttgaggagtaccgcctcccatcccggtggggaactcccaagtcaagaatcgccggagtcattcacttcgcagcctataaagccgtcgaggagagcattcggaagccactgaagtattactccaacaatgtcagcgggcttgtcgactttgcctcaacactcggagacttcggcatcaagaccttcatcttctcctcctccgccaccgtatacggcaccctcgccacctccggtcttccattgaaagaagaactgtgtgttcacaaggaagaggtgtacacagatcacaaaggcacacaacagtccatccagcctggatgcacaggcatcaccaacccatacggacgcacaaaatggatgtgtgaaaccatcctcgccgacttggccgcatcagaccccgaatggaccattgttgcactccgctacttcaaccccgttggctgtgattcttccggtcttttgggcgaagacccaagacaggcaccaacaaacctgcttcccgtcgttgtcaaggtcatgaccggccagtacgccgagctctcgatgttcggtacagactgggaaacagaggatggcactgccgtccgtgacttcatccacgtcagtgatctggctcgtgggcatattgccgcgctcagctcggccaacgagggcaaattgacagaaaatttccgcacgttcaacctcggaactggaaagggaaattccgtcatggatgtggtcagcaccatggagtctgttatcgagaagcccattcctcgccgtgccgcgcctcgtcgcgaaggtgatgttggagcttgcgttgcggtcgtcgaccgctcgacggaagagctccaatggaagacagaaaagagcttgaaggacgcctgccaggacatctgcaacttcttggatgtcagtggtctgtcttcatagcgcgttcctcaaaactcctggtccgatatggtcgttttttttcttttttttttgcttttcgcttgttcctaatacctgctcaccgaacaatagcccttacgaggcatgtgtttcagtataatgattgtctgtttttctgtttgtttagcatgtgcatagagttgcatgactcgccgagtattctcggtcggtctctgtgatattttcccccttgggtgtacagagtcatttacatacgtcgctttgttgctatattcgaattgacaaaagttcccatttgccatttgatccttgaattgtacaggttctccgtgaatactgctagtcgagaactaatcattagttgttgacaggatatggtgcaaagatgtgtgatctcatgtgccagtacactttacacaaccggtttggacgtctggataggagatttcggggtttgcaggagacggaggatattaatttgcctcgcatgtagtctatacacgggctagatccttgtagcaagaaatgaagctgccctacgtcgttgaccatatttgttgatgcatcacgtgactgatctcggtcttggcatcaaatatggccgcagttttctgcgacagccttgtccgcgcgtgtgttattgcatcttcaatgcaattgggatttcttgtcgcctaggaccttctattgaacgtttcaataccgtcctattctattccctgtcttctctgattgattcgccacaatgatctgcaaaagctgccgcacgacaatgctgtcccgattcaaccagcagccagtgatccggacggcttcagcatgtgcgcgccagctgcctctggttcgcagccaattccgctcatacagcagtgacaacaacccacctgtggctgctcctccttccccgtccgcccccagacaacccacggtcggcgacctcacaactccgtccgccatctcctccgctacccccggcatttctcagcctctgagcacgcccgaaggtgtccacactgatgtccaccccggagcttccacacatcccacttccgtgcgcccaccgagcagctgcccagccggaaccaaactgaatggactcaactacttcaagaacaagccggatgtcttcgccaaggaggattccgagtacccagattggctatggaacctcttgggagattccagcaaggaaaagactaagcagggtggtgttgacccaagcagtaagatacctcctagaaatcccgtttgcctatgatgcttaccccgtcgcagccttgaacaagaaacaacgaaagcgttacgacaagaagctggccgctcgtactggccccctcgctgctaagatccccgcccaccacaacgctcacgatatcacccccgcaccctacaaccgcgacgcaccttcagcggatgccatggccgatgccaccgagggctttgagcggcgttcggaaattatcaggagtgcccgcgacgccagacggaaggccatcaaggagtccaactttctgcgcggtctttgagctgttttgtatcagttcgagtggaagggatttactctgcttgttggggttgtgtcgcaggcgctcagaaccacctcgattttgcattggatattggatagcctggacttttcggagcacccgggatgtattattacattgatttctttttcgattgtgctatatatcaatgatattgtctcagattaagttcgcctcggagtaccccgaacagccacctctgtctcagaaagtcgagatacataatctattgggaaaccggccactccttctcctccccttgcccttcaagccaggggagacaagcttcataaaatgctttcaactccccatccccaagagcaagaatcttctcaaaggtaccctggtcaaagcgctcatagaaacccaaaagtgaagcgagaataatatccgcatagccagccttctcaccctccaaaaacggccccttcttcccctccttacccttcagcatcttaaccagtgttcccatctccttctcgataagctgccatagcgcaagcaactccgcctcacccgtcggcctgacctcagaaagcggcttcccgaacgccgcggagcgcgtccggataaagtactcccgtccacgctcatccagtccagatggaactctgggaacgatcagcgacttggtactcggtgcgatcagctccacgatcttgtccacggcgaccacgagcgagtaacttgcgtcgccggaggggaagagcgggggcgacgggtacagcttgtcggtgtacagggcgatcgcctcggattccattagcacgccgtcttcgttgctggtaattgatcccttgtggctgattgccggtagtgtgtagggtgtcgttgacttggcgggtgggacgccatgcgccttgagtaaaggtgcgatatccgggtatgagacccagctttgggtgtaggggatacccttgaagttaaggaccattctggtccggagagttctgggagaccatgacttggaagtgcctggttagattagttatttgtctgtctgcagtgagtcatcgtctggtccgtacccggtaggtctgataggagatcgaagaaatggattttggattcagtcattgtgtaattgtagattttgtatctggtttagagttgaagtcgtgctttaaggttgaagtcgagttgttgagttgttgagctgttgagtatacatgtagttctatttatacagccctggagacgtcggggcgggggtttgatttatcagctgaaattctttggaagcacagaaaagaatagaagctgatcaagaggctttcctttcgttaatacgctgtgagtatactttcatcgaggctaagctgcgagaatgaaggtagtgttgaataaattcatatttcatatccaactaatagatacatcaagtaattcgaataccacagccaaaagtctcacttcatatccacgatatagagagcgccacgttggcggggagctggagcgcacgggtcacatggggattttctcccgacatcaacggtatgttgtctctaacacgacgtagttcataaatccaattctccatagaaatccacaagtactccagctaagcggggcaacctttgccaacaagcccgcccctccagtcactacccaacatccataaggttgcatctcctatacaacatacgacatactccctgctggaaaagaaagctcactgacaatataccagtgaaagatggagcatgtcgaagttctcgtggatcgtgctaaacagctagtactccacgagccacccagggcacaaacacacacacacaccgtggacaaattccacccatctttggacgatcatatccaggagatctacaagtctgtcaatgcatatgctccgactacagactatttcctcaaggaaatgcagcatgacaataccgtcgcagattctcctgagcccgtcaccgatgctttggcttcgctggatgcatttcgtgagtacatgaaaggtgtgaacgcgtctgcgatgggaccagaagaagccctggatctttccgcgcctctttcggattactttatctcgtcaagccacaacacttatttgacgggtaatcagctgtacagcgacgctgctgctagtgcctatacatctgtgagttgatggttgcagaatagtcataccattttgatccatggatgttatgatctccaggacctggaattgaaaatttactcatgttccaacaggtcctcctccgcggctgcagatccgtcgagattgatgtatgggatggggaattggacaccccaagctcaagtgacggcgggataggcagtgacagtagcagtgattcagagactgaaaaggggaagggtatgaggagcaaattgaaagaaaagatgacgggccggaaaagtggccaggagaaaattggtaaaggacataaaaaatccttatcctccaaattggaagcgaaacttgatggcgtccttcgtcgcaaatctgccaagtcgcccccgcggccattggacgaagacaccgcgacgagccatatgcctattccggttgagcctcgtgtcatgcatggccatactctaaccaaggggaccacattccgtgaaatctgctatgcaattcgtgacagtgcatttgttgccagtgatcttccagtggttattagtctcgaggtacatgcgtctctcgagcaacaacagacgatggttgacatcatgtcggaggcgtggaaaggattgctcgtggaggctcctccggatggagagaagcttcccttgctagctgagctgaggcggaagattttgatcaagagcaaaggtgtcccgctccatggcgaggacaagaaacccgaaggagaacctctgacgccgcagaattccgaggaaaagtccccgggacaacatccgccgaagcctccaaaggttcttgaggctctggccgagatggctgtttatactcgcgcctatcatttcagtcatttcgatcaaccaggtatgtatcattgtagatatggtcatgaaggcaatgctaactgaccaacagaggctaaattccctcatcatgtgttctcgctgtccgagaaagcagcgcgagaagcccatgccaaccatcgcgaggccttgttcgagcacaaccgaacatctctgatgcgtatctacccgtatgcattccgaatcaactcatcgaaccttgatccaacattctactggcgacgtggcgctcagctagtagcgttgaactggcaaaagccggacaaaggcatgatgcttaaccacggaatgtttgttggaacccacggctggcgactgaagccctttggctaccgcagcagcaattccccgatagatatcatcgtgcgccacaacttaaccctctcaatcgaagtattcgccgcgcaaggcctctctctcccaccgggcgaccacagcgagaagggattcaaaccctatgtgaactgccagctgcacgtcgaagaaccggacggcgacatcaccccgggccaggacgatgccagctccgacacggagaaaagcagctacaggcggtgcacgaagagttccgtaggttgcaacccggacttcaagggccagagattggagttcccgaccgtgatgggaatcatcgaggagctgagtttcctacggttagtttttcttttctccgagattcccccttgctgcttctctacccctcatcacattcgttttcaagtatgcaggcataaaacctgcattgtgatacccgagaatatatgcactttcccgcatcacataatcatgacgagtgggcttgggatttgcttcttccagacttcccacttggtaacgttatgcattatgcactatccactattgggcttagggttagcagggcgacctgtggctttccgcagaatcagctctacggagtcctatcatgcataccaccctatgcgttccactatctacaaacaagaaactaactcgggtctgccttcctttcttaggttcaaaatcaaagacgacgaaatcggtcgggatgcattagctgcgtgggcttgcgtccggcttgaccggctgcgggagggttatcggctgattcatctccatgattatgccggcgagaaggctggcgggatcttgctggttaatattgtgaagcgggttacttgactgcccagatgacgttgtcaccgtgtatttatttgtttagattgtcggtagtatagcgataaagtatatcacaaattctggaattctatattttacggaacagaaggccatcgaaggaaacacagcgccaggaccgccgagtatcttcaagcagggtttgggcagcatgtcgtacagcgcacctacgcattaggagcatgcggagcaagaaaatgtagcaggaaggcaggccgatatctgataaatgtgacaagtccttcgacatgtgtatcacaaactcatcccattcattttgacatgaccccaaacggcaggctacatattaggatcgctaccgaagtgcaatctgcccgtcagcatgcatatctgactcgagaacgtcacacagaagcaatgacacttcggcacttcggcttttgaactcttctcttctaacttcgagaactgcattgcagagctaaggcgcaacaatttcgaagacagaaacaactagtctcggccttacaatttctcgccaagggtgtctgaataaaggcataaaggccgagcgcggggtagatcatgtcttactttagctaggcggctccgttggcatcgaagtgggtgcatggagaggtctgtaggctgcctgcagtgtcgtgctggcggtatatatcacgttagaggattcaattcttagccgcatgatatgcattgtgccgatgccgcgcatgggtaccattccaatatgttggtttccggaagagcggctactgtagatgtgcatatcgcaatccgtgacttgggcgatatctaaatcgggttcatttactaggttcgctatgtacgagaagaagtagcggtgacggatcagacagactcgggcgtaatggtgatgcatagaaacgtggggtagttgtccagccctggacttcgaagcatttggcctattgatagtatagtacgtgggtggaaaaaatggtcttgcatgctgcgagccatagccccaaccgtggggttcgtaccagaggaggatcggtgagaccgagagtcaaatcactaggtacaatatcaccttagaagggtcaaggcgccaagttacatgcatcagattgatcaacatggctagtggggactagcagataagtcaagttgaccggtaaatcctccgataaagttgtggccaaagagggtcacacgtcggctgaaggatcgcaatatgagacgtctacggttgtcctccgattgcccagggcctcaacgaatacggagtctggaatagtcggtgactcaacgatagaactcgacatggttcttcctaagcaaagtacaatttgtcatctgacagatcctggtgcaggggttcatgcgtcacttccacaaaatttgcatgcagaacagagtgataatcggcctttggcgttggatcaaacgggctagaacggtacggccaatgatcggaggagatcgtctttttaaggaatggagggaacccacgttgaaggtcattggccaatcacagcatgcctcctaccgaagatgaccgaacactagccctatctgggatctgccatcgttctggggttgatacgtcaactcttgaatgtgttgagaagttgcaatttcctcgtctccccccttttgcttcgaagtatcggtgaattgatgcaagttgccgagacccgctacactcatttctttgtctgatttctttggatcgctgatcccttagccttttggacgaaaacatggtgaactcacaaggccggaggcctcgggaagtaccgacgaagccgctgtgattggccttggtaggctagtggcgtacaaaagaggatcatgatgacccttttttttgggcacaggtacctgtgcaaaaaggcaagcccgtcaagacgaacatccatctactgttactggctgatatcattgggccaaacaaagaagtgactgccaggtaagtttttgatattaaatttgagattacaatattattatttccatattaattatttttacctgattagccaatgtgaactagatctattcttctctttcgccttttcccttgctttccaggccttataaggacccctcctcgtcctgttccatggccttgtattcagacttcaacctaagacagtcctgaacatcctcgggcttcggcaaagaactctactcacaccttctctcctcgacgtctatccaagcaacatgtgttccttcaccaaatgtgctgcaccagtgtgctctaactccgctgtcatcaccaaggtccgtacaccttactcctatatcgatgtggtacttccagcacatttacgaatatactaactatcaacagatgcctggtgtgcgatgccccaattgccaagcacaggggaaagaagtctgggttatcccaggcaagaactgtcacatctgccacaccccttgtggttgataacttcgaggtcctgtgctgcacatctatgggggaaaagaccgtgcagtcaaatctgcccatgctgtccggatatgatctgattccacacttcaacttcatacactctcccggtcatatgggcattccctcttgaatctgaaggatgaattcaatacgtctaacacacgaaaggcctgcgaataccttggagattgatacacttatttgggactgggtgaaccccaggtggaaggcgcaaaatgttctgtcgtggtgtttttgttactattttctttagcgttttctgataatgagatatgacaattcttgattttggcttttcttcactagacgaaatggtgctgttcttgccatcgggccgagtagatcagacagactgaagtgccactcaggtaaactttttaagtacaatctagaagtagtaggtagcccacgtgggagttcccgggttatatgacatcattcactcatagcgacaagagtgcacgcacagagtaactctacatatatacgggaatatagctatgatacatatttgactccctctggtgtataagcctttgtaagctgacgcaggaaagcaagatgaggttctatatgccactactcctctaagcactatccctataaagtcatgctaagactgtacttcggctgcaataaagcggcaagagatacaccccaaaacagaaaagaacagggtgcgtgacctggaaatttatccggtccatacgtatccatcgccttcaacttccatctcatccacaaagaaagcaacattacaaatccaagccagatcaccatgacggaaaagtatcccatcggcacacgcaccgagagcgagcgtctcgtccgcgagtgggggtttcgacatatcttcacctggacggatggaaggtacgtatagttttttgttagaatcgatacatgatacacccaaaatgaaacccagctggactacggcagcaaaacgttctctcatttgatgtatgcattgatgctgactttattcagcaacgcccattattccccgcactcgcatggcggtctgacgacacatcttattcgtcgggggtctctgactatcgcataccctgatgataatgcggagcataatggggaagctgaaaaggtgacgtttcgagttggggagagggttgatgttcctgctgggaaggttcatgaggtttggattggggatgaggggtgtgagtatgtgattggagagtagaaggtgacttttgcttttactataaccattgtttctactgattcggaaattcgttgataaatgttgtgacattatgccgataagctcagctcattctattctaggtattgaatattttttaagtctacctgtgccagacaatgtagtcgtgtctctagtgcaagaatcggaaatcaagtctgtacgggcattagtactcagttgcacagcaggagacaacttgaaacatacctcttgtttccaagatccttgttttcaacgacgtatcgtgagcgctcttcgctggacattttgtcccagacagcggcattttgtctagaagggaatattagcaaaactattggatctcacagtacgggctgacatacttgttacgccacacgtagtaaaccttggcaaggatgaatatcgccatgctccacaccgaaagagcaataaggaccttattaccggtgtggtagtacggcttatccggggtacggtagacctatgtgatggttagttatgaagactcgagaacaaggaaccggaaagactcacgttgttaccaatgatgttactagcctgcaccatcatgttgtagatagcagtagcaaccgttcgcgtcctcacagagcctgcattgcgggatgtaattgcgacgataatcgcgtgcacgtaaggcataccaatcaacaagatcagcagaacccaacgcacccaaggactagcactctcagatacagtctccaacgcgatcaacaggaccatagcccaaatctcagcaccgacgccaagcagcagtcgctgattgaaccgctcggaagcccaagtccacaatagcagattgataatgaagatcacataggccgggatggtgagcaggttggtgttgaaagtactgaaaccaagcgacttcagttccagactgatgtacgacgtagccggtgtgctggggatcatccaggtcaggccaagcaggtagatgagccacatgtcgtagtccttcagggcctgccagagcagcttgggagtcacggcctggcgattgtgcatggttcccttactcggatcatcgcgcaggacacggttgaccatgattttctcttcgtgctcgttgaaccagcccttcttaccgcggaaccggcctgcggtctgtgttggcgagggcggcatatagaatgcagcgacgataccgatcagtccggtgatacaaccctccagggcgaacaagtatcgccagccgccggtgccgtccgattggcgaatgtggaggaagccaaatgcgaggaaagcgctgacaatcgcggtggcttcgtatgtcatccagaagtagctgagtcggataggcagctccttggacttgtaccagaacgataggaagagaatggtgtcggggatgaagccaccctcgaggagaccgagcatggcgcgggtcgtgaagaatccggctctgttgtgcataaatgcctggcatgaggcgatgagactccagctgatcatttgcactggaatccagcgatcggggccgacccattttgaaatgagctgagagggcagctcggcgaagaggaatgttaggtagaagattgtttggccggtgttgtagtcgtttgtggtcatgcctagatcgtctagcatgttgtctgacgtggcctggacgatgtttccacggtctagttggagcgcaaagaaagtcatacaggcaaatgtgcaaatgcgccaatcaatctgcgaagggtcagttacttgaacagaatacgggagagttcagtaacccatacctttctgacaatggctttctcttcttcctctgtccactcaaagtccgggtcccagcgatgggcaccctcatattcaggaatgggcttgtagaaccgcgggtcctcggttgtatcaaaagcacagtcggtctgcttggcacgagggctgtcatacgtcgacgaagacgaagactctgcggataagactttctgggtaggcttagagtcaataggcccggcatcggatgccgtcttattggcgtcttcaaccgtcatctcgtatgggattggaagtgagattacggatggagaaaagaagcattgcttgggctgggcatttactcatataagggaagactcatacgtttatttatcacgccatatttggcagatgtttcgctttggcctgtgcaggatgtggaccaggcgaaaaggtaaaagtcacaacatcgagggcagaaagttgtggaactgcgatgatcctgggcgatttagagtcaattagggttgacgagattggctaggttggctcggttgacttagggaggcctagcctggaactcagaagggcactctacaggatagatagggtagacggggaaagtttccagatccaagagatttgttgaagaaaaacagacggaaaggcgacgttggcttgaatcacgcaagtgtagtgggattgacgttagagtcaacgagttagcggagtcaaagtcagcaggggtctcgcagaatgaacctgtttcatgcagatcttcatgaatgcgagttagcgttgaataataagtattctacgaactcttgtatgtattcacgacaacctatggtgcctctacgccgtaccctaagtcccttacatgttccatatctagaacattgactaactatacaactataactatggagataatataactcctaactataataaatagaaaatatcgcgccaagccagttgtatatgacgccatcagcagcgtatctcgcgtactcccacagcgcaacggtcgactcgttttcttcagatcacggcaattggcaatgcacgcacgcaattcggctatcacgtcattcccaatgcgacgcttatctcgtatacatacaataagagtacgtacctcgaacctcctcggctcgctcgctaaattgattgtatgataacacaaagttgacacttttctgattgtcccgcaaaaaccgcaaaaccccgcaatgatggcgcaattcgtgtgctcggtttgctggtgccgaaatagatatatattgccggtgtaaacccactagaaaagatgaagaaacatatctgatccgcagaggcaacatacacatacctcgcaaactcaaacatggctccctccctcactgagacagtaggccttcgcgccccgcctgttgcgcttccgctcaaggcggacggtggtttcaacaaggagaacttgatcggctacaagattgaaaaggatgttgagattaagggcacagacaaggtggctcctgtatcttatccggaatatctgcctgtttgggacaacgagacagaaaggtatattggccttgatgatggcttcctaggaataccatatctaatagacatctagatatcctcctctgacgccctttgagcactacgaccacggcaaagacgccgacccctctttctcagaactgcttcccgagggagtccaagtcgaccagctcactcccttcattggctctgagatccacggcgtgcaactaagccaactctccgacaagggcaaggatcaattggctctgtatgttgcacagcgacgagtcgtcggtacgtgacagcccttttttccatctccatctccaagcacggatctaacaaaccatccagccttccgcgaccaagacttcgcatccctaccgattcaaaaggccgtcgactatgccggctactttggccgacaccacatccaccagacctccggtgcccccaagggattcccagagatccacctcgtcttccgcggtgccgacgaccgcactggcgagaccttcctgaagcagcgcaccaacactatcacatggcactcggacgtcaccttcgagaagcagccccccggcacaacattcctgtatgcgctcgacggccccaccaccggcggcgacaccctcttcgccgacatggtccaggcatacaagcgtctgtcgcctggcttccgggaacgtctccacggattgaaggccgtgcactccggcctcgagcagatccacgctagtttgaacggtggtggtattgcccgccgtgatcctgtttcatcggagcaccccattgttcgcactcaccccgttactggcgagaaggcgctttacgtgaacccccagtgtaagtctgtctcgacacttttgaatgattgggaaagctgacatgtcgcatagtcactcgttacattgttggatacaagaaggaggaatccgataaccttctcaagttcctgtacgaccacattgccttgtcgcaggatcttcaggctcgtattcgctggaaggctggtactgttgtcgtttgggatgtaagttacagcctcagcctattctttcaatgagaacaaaagctaaccttcgcagaaccgtgtggcttgccactctgccgttttcgactgggaggatggccagcgccgacacattgctcgtctcacaccccaggccgaggctccctatgagacaccctttgaaggttagatggggcgctggaagccttcgaatttaaaataacacgtcgctatgataatcccacaaattgagaagaacatcaatgaataatttgaatatcatgcttgcattatcagcgtagacctgtacaaacatagtaatacgtcggtaatctctcttcctctgtgccatacatacaaaaacccaacaactcaagccttctcgcgcctgaaccgactcaaaagcccaacatgccactcgttaaaacgcctagcagagagcgggagcatctcgttactcttagtcaacgcctgcgacatggcttcaaagatcatagacggcaactccaactcttccaccgacaacggcgaaggattcccgatttccggatggagcagctcgtccacatcaggagcctcttggtagaacaccttcatcgcttgctgggccatgatactatcgcctgcgctggaattcgagtatcgcatgtctgggttgaagacccacagctgtcaagtagaatatccgttagtgtcatttctagaatttgatatggctcaaattcgggagcgaataggaatggaatagaatatcacctaccacgagaccgctcttctggccacaatgaacgacgaatcgtcgggcgctttctctctcgatcaattcgaggagctgtgcagcgacgattgtttctgtcgggtggacctcccactttgtaatgtctgcatcgctggatgaattcgtgttcagggatacgttggctttcagaagtcgccatcccttggcggttggatcttccatgccgataatggaattgcagtttgtgcagtcgagggttcgttgtggtgagagtttaatgttcgctttgtgctcttcatcattgccctggattgcatgcttgtcagtacgttgtacctgaaacgcgaaatgaactattgcgtcgaataatacttgtaaatgaaggaaaaagcattgcattcaaggtcaaggttatatagagcacatcatgcaaggaaaaataatatatgtaactctggtaatcacgcccgctccactgcttagatagccggcgctgaaaatagagaacaccctgagtcgcagaacaggaaaaagcggctcacacaagtccagtatcgcaaacgaaaagagcgaaatccatctggttagagaggataactaccccccgaatttgtgatcctgttcctgtgagagtaccaccttcgcttgaattgcagtacacaaggtgcatttcgtccatcttgggcaattgtatcggaggccaccccactgataactgagtggtccccttctaagttgcccggttctggggataaaaagggggaaatgatgatgggaagaagaggggatgtataaatcttacctttctcaatcctatgcagtctgtttcagcaaggaggaaagtagcaacatcaacaaagaccgtcccggaaacagccacaacgtggctatccgcaccataccctttagtctgtgcggtttggtcctcaatctcgagcgcagtgtctttctcctctttctcgtgatctgcatgggggtcaggtttgtggcaatgccagaaatccatcatttcagcccagttcccacttggaaggtctttccagatccaccccggggtagttccctgattaaccgactcggatattagcgagggatcaagaaaaacctgttcacactctcgacaacgaatacgagtcgaagacgacatttcatctgctgtccagggtgtgaattcatcaattagttcatcccgtggcgccagcgcctcgtcattgggatcgacctgcatgcggaaggaataatcatggctggggttcctggtgccaccgggatagttggtgctactggaatccctgatgccactggaattcctggtgcgactgggatccctggtatcactgggttccgatttcggtactggcccaatgggtgtttccaacacacgccgggatgcggcgctaacgcgcgcgggcagtttgattgtttctgtgacatgtttaaatggttctggtagggagactgtgactgcttttcttgattctgaaagttggatatctggtcgaattccgtcaaattgtgttgtctcgggaagtgacacgtaaagagttatctggcggatgtttggtagaaattctgcgtgtagatagagggggatatcggcatcctgcattgcagatgttgtacaagctcgaatgtgtgccagacagggatggtgcttgatgccccgtcaaaaggataagacgagagagggtgagcaacaggggtgattatttagcaatcatgtggagctggagtttctgactgtctaaggccatgagaaacatgtcgcgcttagattatttggacgttaactacgccgcagtggtggatgtcatgaccgcgtttgtcaaatgcaaacaatgcaaacaaccttgggtaccttgggagccaacatctacacgtgaccccatgtatcgcttcgtcgaaatgaagaaacgatcatctatcaatttattttcttcgattattcattaaatcgtacataaatttgagttaagtagagtatgaacaaagcctacagatcatatccgacaaaattccctccccaacacttgaactcagtcgcaaatcgcacagcagccttcaagaagaagctatcagaatcgccccaagtcgaggccagttccttcagtgctcgagtggtcttgacaaagtacacatcggatgaaaattcacccttgacagctttctcggcaacccatttccagtcctttccattcaagtcataattccggatttggtccattttgatctcgggccgcagttgcgcgacgtagatgcccacacagatcaaccaccattggcgaagaagagagatttgaaactggggaggaattaaaggcaacatgacacggaccgcgtggctggttgcgaggttcatagcgaagaaccaatcgtaattcccggccgaatctgctgtcccaactagcaatgcagctgcaagctcttggctctcgcggaactgttcaattggattgtcgatcttccatgctttccagtgcttgagaagcacggcgttgtggctgacaaaaagggtattgaggttgtcgtcgccgggagtggaaaagaggccatctaagtccttatctttccggaccatgtcaaatatttcaaagagtgactttgattcatattgtacctcatttttcgagagtttagggtcctccagggacttgtatatgtcgttgtgacaggttgctgcaaggccgagtgcctccattgcaacttcacgactgtccatttcaaaggcgtatgcaagatgaatcaatggcaatccaactagacagatgttagagcgtgatccccccggaaagctgaaaacatacgagaagccattatagaatcaaacatgggctctttgccagtatacaagtattcggccacaacttccttccagtcatagctgcggtgaacgacttcatcttcaaaaaaatccacaaaggctcgatcaaatctggttggcgttagtgaggggtcccaagttggaaaggcccagacaagcccagcaacccaccctcgccgtcccaaatgacctcgccaatcaagggtagtaatttctgccggtgaatccttccatttgactagaccagacacttcatgctcgtataggcagcctaaagtatcggcatctgcgccttgcagaaaggaggagctcaagagctgcaagcaggtcaatttcatggactaacgagtaatccatacataggaagctaatgttactaatgtaattcaaatgactcacatgtgttaactgattagggaagttccgacggtcgaagagcgagttctcgacatggttcaattttagtaggtgcttgaatgcccgagctgccttgtcttcagctgtctcggtttcatggacgtggacagggggcagatcgatcgcctgagttggcgtggacgagaacaggccaagcgaaggcagtgatggccaccgaacagtaaacattttgctgattagtgaagctatgtgtaggcgtttggatgggattgttgggaaagcgtcacgtgaagcagaacgtcgtatgacgtaggaaatttaggttatcaatctggtgacttctggtcacatgacctggtgaatcggacgacttccagctactcaccttgcttcagatatacaaaagcattttttgatgaatcagacgattgggtaaatcgatgctttcggtatattccagaaaattgtattattttacgacatattactatttctagatgggaaagagtgcctggattgagggatattccatatgaaaattcatgattttgcgccataatttacattgcatgcatatcctgaccgtctgaaccttacgccttatgatgttcaaccattggaatcggctgctccggctgagcagcaacctctccttggaagacttccatttcaagacggggaccgacgaaattcttgcgtccatctaccatccactgaatgaaagagataataaagacaataccaaatgccgcaacacaataatctgtcacatcgaattagctttatgtttttgcatcaaaaaaagagagtcaactcactcatgttgctaccagtggcaggcagctcaggggggaagaggaagaggatagtagtcagaagaatgtacgccagcgagatctgaggttttgagttagtaataatttcagtgaaccgcagggaaaggtatcatacgatgttgatggtccagccaacaatttctggcaggacgaatgagcgctccggtagcatttttcttcctcggcagcagttcactgcaattggcattccatatgaaaggccgagcaacaccactgacgctgagacaatagcattgaaagcacttggagatgttagcaatatccagggtggagtgttatgcatatgcttacctggatgagcccaagaagatacaaccgaatatgaccacgagagccagattgagatataatgagttcaatgggacgtttagtttggggtgaacacgagagaagaagggagacgcagggagaccgccatcactataactatatcagtataatgaccaaatttgaaagatgaacaataacgtaccgcgcgaaggcgtagaccatacgactgctagtagtcataatagcgattgcagcgaataaagcgcagactagggggaagctagaaaggtgtcagtacaaggaagagacaggagagcagtgacacctacatcaagagacagatagcgcctgcgttgctcgaagtggcattcttcaagattgcaagcagcggggttgcagcagaatcaataacttcgttgatatcgccagccacaaagagcagcacaataaggaagatggctccagtaacggtaccgatcacgacacaagcaatcatgatcttgggcccctcaaccgagggattggggatttctgtaatccattagcctcagatccatatccaagtgtaaactcctggaagttaccttcaatcatgtgggcgacaccgtcaaagccggtaacaccaagaccaccttgcagaagctatgaatatgttagagatgctcatgaactttcgcacgaacgacataccccaagcaaccacgcaattccatcaggccctataacagtcagtttgagagcatagttagataatgatcggtaagacttacagcctgtttcgttgatgaagtcggtgaagacaaatctgttcattgtcagtgatttagttctaggattgtcgagcagacaagacgtactctccggaattatagttaggcgaggcacatgaaagtacagtaatgcaaatgatggcaaatcctgacaaagaccagatgactgtgggaattagtaagaagtctccgacagctcggtatagggtatctcacaagctgccttggtgacatagggcataatgttgttcataaaggcattgacgaggaaggcaacgatattgtagccgatgtagattaggaattggtgccagcgctgggggttatagctctggatatggaagttagtcaaagatatcaacgttatagctcagaataacctaccgggttcatgagagagatcacacccagaataagctgactgcccaaaagaccagcagttgcgaccagcgcaacccagccagagcagttgatccagccagtgatccaggagagaattggcatccattttttccacgaagtcacagcgacccagtgatattggcctccggcagtggggtatgcagaaagaaactcggctagggaagtggccatgcacaaattacagattccggctgtaataagacctattgagactcgtgtcagctctggattgagaatcgacagagagccaggcggatacgtaccccagacaatactagtgcttcctcccgagggtaaactgagagacaaacttgccgataaagcagtccatgactgtcaaatgtcaattgttgattctcatggaacttggtttccgggcgcgtcacgtacatttagaatggcaaaagcaaggcccagcattgaacttcaaaacgaacagacattagcacaatcaggaattcatgttcacttgcagcacgtacatcagcgagtaatttcgcttcagctccgacttatggcccagctgggccagctgagcctcgtcgctattgtattcttctttgtccatatcgagtgctgtgtatcacaagcaacaagtgatggaaagaagaggacaggtaaggaggaacaagggtattattaaaccagtcccagattgcatgacctgacaacggaatttcgaatatcaaattctccaatcttgccgttctgcgctaccgttggctccccgcgggggaatacagcgagtacggagaagtgttaggtaacggatttggggttatagaacattagccagggcggcgataaccggccgtgcctgtgactggctgggcggaccgagatcggcaacttcggccagtcagagctgtgaagtcaattagctaccaaggcttttggtcaatcgcggaccgatgatccatggcttgcggcggcagccccagtgcttatgccacgatcggcgtgtcattggtcaattgccgaccccacatttattgactagcgggaagaagtctaactcggggaaatggataactgcgaaaggacatatctgatatgcaggatacatgaagatagattgttctcgaagatccggtccaacactctcgacttttactgtttctagaggcttttacggcttttgccccctgtttcagtgaaccggatcgagacgttgaggttgagctatgtggagcggtgggccgtaaaccttccaaggttatctctcgagacaaatactcctatgtaaagatatctcttgtcttcactgagtggactcctttcaccatgtggcatgctttcttatccgatcgtccatcaggacgtacccgcagaggcgaagtgtgggccgttgaccttgatcttattccaatgtgctccgagcgtatcatccagaaagaagataattatgagaatcgaaggattcatttacataaaacgaagaagagcaaatttactaactagttaactagaatttgtattgatttgtcacttccattatcccgagaatgtaccgggtacaaagtagtacgtgcattgttcaatcccaaaccacgtcttgacatcatccatggaaatccaatcctcagaatttccaacctctcattgttcaaatgacaaatcatggctggtctcaacaaacatggccaggcaaacaacccaggacccccttgacccagtgttcctccaactcccctgtccgttacagccaacagtctcaaagttaatgaggcctctctggcatcagttcttgcattcagggggatagagccacctgtggctacatattctgaccctcagcatgcagcaggaaccaacccccaatgcactcggttcgaacatgctcaaccatctcggccatggtccgcacatgaaaggcgcgacggaagatctcgaaagatcgctcatacttgtcgagagcaggatcaagttgcatcatctccatgtgggtgttggaaatggtctccatttgggggtgcgtgagcatggcagtgcaaccacggcacgcgtaaagaattttgcgcgtattgtttcggttgacgacaggcacccggcaggaaacttcatggtggaaagcatgcaggttgcaatttcccaacgagatgaggaaacgcatcttgacagcgttaggggtatccagggaaacagcgcgataaatatcatgctggttcacgaccgtgaattcgtcatcggaaccatcttcgtcgtattcgttggcttcgtcgtcgtcagaaccgaacaggccctccgcagcacgcttgatggccttgcgggagccatggatttccagggctctggtcagcgccaccttgacaggaataacccaggcaccaagatcacccaaatccatgtcatcctcatccttgcccaggcgcggcaggaacacggtttcgggaccaatcagatcgggcaggtcaaggccaaagatcattgctgcgcgctccaaggggaggcaccagtatgcatggttgttgtgcacgcatgggtggcagatacgctccatggtaggaaggtagagctggacagtcgagttgccacacatgacgcacttctcacggataattgcctctttcaggtcgtgaatgctccagatcttaaggctctggatgttcatgagaatcttcggcaggccgggggcccactgccgcaggagggaaaccgcgcttttctgcacatagtgattggcgatgcggttgacgtatgacaggctgatagcactaggcaggtcgagtttgttgatgatcatgtctacgacttcgttcgggagacgactgatcattcccaggtccgcagtagcggtccccttgggtttgatggccactggaacaggccggacctcgacatcaacgatgccagtttccaggctgcgggggctgtttccaaggattgatagcaccttggcagcctcctggtaggtggcaaaatcctttccccaggccaattgctccggttccagcgtgatggtttgcattgtagcgaaccgcgcgtgcaaatcacaaggagggcaatttgttggggaaaacgcgttgcgcgttaacggataaaagaactttatcagtgttatgtcagtggctgatgtgatgaacaaacactgtaggtatgataaacgcgaacctgatgaaaacaacaaccaacgcgcgggttgagaaggatggagtgggaagggagatgtgaagaggaaagggaaaagtaacaacaagaaggcacaagaagaaagagacacaaccccccagtttatggactgaagggaatgggaaagtacgggaactgcctggcgtaacaaacacaataccagtacctagggcactttacgatgtttgttcacatactctatttctcagttaaagctttcagtaagcttgtgctcgtagaaggcctccagcttgaccttccatacatgcactctcatctacttgaggatataaaagtgagtctactaggaagatcagtccaaataagtctaacgtcactaccaaagacaaagttacaactgactagtgcttcaatacttccggagaacaaaaggttatcctgtttcattcattgatgtctggtaggaaacttcactacatcataatagaggaaatgtctggcctgccagtccaccggggatatcaccagagctgacagctggtgggctgggatagagagtagtccatgaatgcatctatcaaagagatatcctagatctagtgtaatctacatagctaatatggttcaaaatgtctcagttctgatacctcttcgtcattagaatcaatgcaagtcgtaggacgtcacataacagtccaagtctaatgcattgatgcactaaataacattggtgaaagtagtgaatcatactatctagaaataaggtacatatattaaattctaaccatgtaataccttgagatacccatggtactgttagtaggcgcgcgggtaatgctagcttaatatcaacgggtaaccttaatttgatatccggcccaccaggaacacgcggtgtcacagggaacaacctaccaacttgaaatactatactcacaaagataacattgtgatagaaacctagggatgttgtaatggcagagaaaataattaaaatgtacagatgaacataggtatatcaaatcaggatagtaaatacaaaggccatcggccagctggcacgttaaaatatacaaacagtgccgggctttctattcaacctcctccatagggtttttcaagtgatcagtccgaacgacgtaatcatcctcgtcttcatcatctcgggcattggcaccatctgccatatcctcatcgtcaccatcaacagatccatcggattccgcaccagtgcgggactttccctttttgctaacgctctttcctttgcctttgctgctggttgttgactggccgctgccacggcggacaaggtttcctggccatttattcaggccttttatacgaccgtggatgctcccggtggtgctactggcaccatttgtggcaggctcttctggagtggctgagccgccttggtggaatgcctccattgcctctgcgattgtctgtggtgcggtatgtgcggagtcttgctttgacttgtctactgcttcgaaggtttgacggatgcgctcaaagtgttcgagttccttggcactgcgaggagttagtatcatggtatgtcatgaaaaagagacaagagaggaaagagggtgagtgatggacacatacctgacacttggcacgagctctccttgagcagaaaggaagtcctcctcggttaccgtcacattcacatcctcctttgtggcgaggtggtcaaagaaccaagcggtgctgacgggaccacctggcagagtcttaatcttctcgtcaaccgcagtggcctttcgagtgatggctttcagcatggcatccgagcagagtgcatacagatcagcaccggtataagttagaggaagctgttccgcaacgcggtcaagcgagacatcggggctgagggcgaactttcgcgtcaaggcctcgaggatagtcgcttgcttcctatgtgtatctgacacacccaggtagagcatcttgtcgaagcgaccagggcggagaagtgcagtgtcaagtagatcgggacgattagtcgcaccgatgacaaaaactccaccgctattctcctcgccgccgttcattccatccagctctgcgagcagctgactaacaatacggtccataacaccaccactgtctccctggttaccacgcttgggcgcaacagaatccagttcatcaaagaacacaacgcagggtcgagcatcccgagcgcgctggaatacccggcgcacgtttgcttcggattcaccgatgtacatgttgagcagttcggggcccttgacggagaagaagttgagagagaactcggtggcaatggccttggcaagcagggtcttgccggtgccgggcgggccatagaacaagataccactgcgcttcttcatgcccttggcgaagagttcgggccgttcaagtggcaactgaatggtctcgaccaaggcatccttaacattagtcaatccaccaacatcatcccagccaacatttggaatcttaggtgcaccgatcgaatcggcaaagttcttccgcgcagcttctacagcagcgtcaaagtctgccttgttgacacctcgtgcaccgtcgcctcctgccagcaggatgtctctaacaaagacgtccgagccggaaagctttttgctagcctcggccagactttcgaggcgagctgttctcgccccggcagctcgttccaccacatcaaccagatctcctgcgacaagagctgcggtcttcagagcaatgctgcccagttccacgtccgcagacagtctgatactgcgatctgcgacggcatttcgtaaaatgccttcacgctctttctcctccggtgcacccatctcgaactcatgggtgatgaggctgcggataccttcggggatagtttcaacatcggtggtggtggcaataacaactctcgcatcattcaagatatcgctcattgccgtgacgatacgatcagcagttagaacctcgatatgtctgatcagcagtgcggtgcagtttgctccgcagtggaaagcccgttctgctcgggctttgagatatgcctcggtcttgacatcgccaccattcgcaccaccttctgtcaagatgtcgtacgcatcaatggggaatgtgtggaggccgatatccgagcacgctcgagtggcgacggttgccttgccgatgtgcctttgctgggatctgaggagaatgaagacgggcttcattcctagctgaatagcccgcgggcttgtggcagcagatatcagatcacggattcgctgctgcaatacagggataaaggactggggtggttcggcaacaatgccatgaggcgttgggacatcatggacgttctttgggattgtcttcacgcccagccaatactcccatccgttgtccagcactccgggaactcggctcacgtcactcccagcctgtaccatgcgcgtagtcgctggatcaagtacagcgactccaccccactgatcttcgcctgtctcctccagctcctctacaacagttggggctacatgcccgacacggaaccaagcgacgccaattttgcgggttccggcattatttgcattggcaccttggcctagccggatggtaatatcctcctcctgactggcactgtcaccgccagcggtgccagagaacaccgctctgccgagtccttcgtccacgctaattccgaccaaatcaccacttttaaggatacgccggcgtgactcaaagtactgtttcaaccccgcaaatagtgctggctgaaggacccgatccattgagagaggagtggaaaccttgagcaacgtgacctctttcgccaaaggcgggtttttagcagcagtgttcttcatgtgatgcaaaagaccgggtttggaggagctattaggggtaacgaaggtcatgggggaaatccgcaggtactttggattttcaatgttaccaagaagcaacgggggaacgaaaactgaaggggttaagcgggtgggtgcacgttgtgagatactggaccggcgttcacctgagtgattaatagcataccgcggcttggaggacggaagacccgaaagaccaaagatcttaactgggcgccaatcgcctgagtcttcaggggagtcgttgaaacttccaaatttgagcgaggcgaacatgttcagctgcggctcctcggcggcttcgattctgacccaatcgccagagaagcatccaatcttggcaagggtgctgatatctacaaagacaaaggagtcgacgtcttcatcgtcgcgaggccgagggtgcaacacctcatttgggactttctgcaagagtccctccaccttgaaagtcttgcctccaccacggccagggcgcagggtggccgatgtgaaattcgacgccacagacccgggggtatggattccatctaatcgtcgaccgccggctctaggagtcgccgaagtcaaggaagacatcacccccgatgatggctgtgggagttcaggtgcactaagagaaatcatgtcgtctagagaatcatccgaggagtcactcatagatcctgctgacccctccgtatctgactcctcagcagctgatgttacctccatttctgtcccactttcaccaggtttatcctcggctgcagagtagaattgttcatttgaagtgtcgtcagcttcgtcctcggccacttgcttcagaagcgcagacctggaaggcacagtttgtggagcgcggagtccttgagggcgagcctggacaagcacaatctttgtggtcggcatcaacaaaccttgcgaaacgggctcgcagaatgagatccgcgcaggcggtggtggcgcataagttatgggatgagaagggagtggcaggggtagcacgtctccgatatgtacaatgcgctgagcccccaatgcttcacggactgcagcagtgagacgctgttcggcatcccttttcgaatacttcttggcttctaccgacctccccgttttcccccaaagtccattcggccccgcattcgtaaatccaccaccaaatttactctgaacatcatcgtgattgcgcagaagatgtcgctcaacagttacaaagattgtatcgaggtgaatcggggcgacatccagaatccgaatctctacggaacgttgtgcctgcagggagttgcgtgacgagtcaactttccccagagcttggaggaaaggctggagtgaatctgctgattcaggaaacagaactgtcgattgtgacattggaactggcgctctctctgtgggctgaatgcgcacagggagtatcgtccaggtctgatcttccacggaggtataagtcggcgtatgtggggcaattgcaacataaagcactccatcgtcggaagtcgtgacatctgatcagagcaagacgagccggttaatactattatcgagaacagtgaacagggcttcacactcaccttggagggcctgctgctggaaaaggtcattcgcaagctcctcggacaatatgccgaccttcccgcgcagctggggatctagcgctaaacgtgctgcgatgggtgccttgttgttcaatcgccgctttccggctcttcttctccgttgtcgaggccgctgggagctctgtccatactgttcgaagtccatgggtgcggtgtcttgtccggttgccgtcggtaaaatgaagcggggagataggagatgtggacggaaggcaatcaccaattcagctgtttaatacgcgcatatgagacgattccctacagaaccccgcgccagatttagcgaattactggggaagaagacgaggttcgccggattcagaatccgggggaaatcaacacgcgggcatctcggtaccgcccgcaattctgccatatcccgaagccgaggtccaatcggtcaagtatatgtatgtgtaggacatatatgcatgaatagaaaggatatatgtattactgttctgctacacttccattcaatcagcaatatggtcccaatggtattcgagagtgtatggcattcagtctaaccccagtcgcaagcgtgccctaacaccattggcttttatctgcttgtgatagttccccagctctggagctccaaatggctgacatcattcgggctaggatcaaattgactcccgaggtctttatcctctgaacgaagagatgagtttagaattgaggccttgtccctttttcttggcaaaatttcgtccctcggaagtacgtcaactctcgccattgccaaggcagactcattcgtagaggttttctagcaggtattggtcatgactagttatttaactaatcgttaggcagttgcatatcgagttcataatttcgcagcctggaatatttaggacggaagtcaggccggtgacgggcgaccacgccaaaggtgatgtggtgatgtaggcgagatacaattccggggggaaaatgcggttgactgattgtttccccgggcggcttgggtagactttcataccaattccatggcctagtgccattgcaaagtgaggtcagttacaacgtaagatagccatataccatgaatgcactccgtactccgtagttggcatatcaatgaactatactacaagggtggcgttgtcggtccttttagagatgccaactgtaccgttgatttcaggtgtagtagcttataaagtaaataagacgctacaaagtggctcaagaatacatcgtctctttggaaagctggtcctttttgataaactgacaggtaggctgtgcatgggcaaaaaggagtcagaaaagggcgaagttgaggggtcgatacgagcaaagagtctatttcgtccgatcagcatagcatcacaggtagagagccgtattcgtttcaatcgggcgagttttcgtccgacaaacgcaggctgagcagaccaacattggaatattattgggttactcaagacgggtacaacaagcggtgataagaggctcaagagtgcgtatgcagctcgtatttggcaagcatgactggaccagaatgagtctttggatgagctggcatatcggcctaaaagttagtcgacggtgttccctttttgttggctgtgtgacgaccctcttgattaccaattgggggccaagaccctgagcgtcatgtgccccatgccaataagcatggccatggtaattttcccagcccagactttttatggcctgatcccagtaataggtgacgtagacatggaagaaaataaaggtgctgactccaccggctttcactgtactttggatgaggacgcgtaggaagaaataaaaatgctgcctggggaggtgaggctcttttggaacggaattgtggtctttccggctgccgagtttccattttaagacagtggaaccggtggagaaacggtaccgtacccgccgggggccacgcgggagccacctcaaatggctggcctgtttaattacggttattggtttaccatacaaactttttccacggccaatcaccggccgtagaatgtgctcagccttcgcattctataccaattcggtcttagcgccttcgtctatcaggcagacatccaacacgcaatgagcctccggtcccttctcttccttgatccgcttgttccccccgtcgtctgttgttcgtgttattcttcatttcaaatcctatttggctattcatcgctgccttcagtctaaggatcctaaagatttcatatttagtggggctgaccgcttggaacccatcttggacgttatatctcaggaacattggaatcccatcagtacttcgaattcggcgaattcatttcaccctaggatatcgcaatccttgattaaaatccttttgagctggtgttcttgatacgctctgtctcaaaccccgctttgaagttttccgaccccgcgacacgttggattggagtgcatgttcttccagaggctctcatacgatcgctatcgtgatagatcttcagggccctcataccggctcaaccattcggctttaatcaaccctggttgggatccaagagaggtggtgctgttatataccaaagaacgaagatcatccgcatcaaatcgaggcttgcatctctgactcgaccgtacgtcacttcgctaatcatttggtcaactctccggtgagtcatgcgatgcgccaatcagccgcaatccactgttcctttcctgaccgagaatgtatactaaattctggccgacatagtactacgcccaataatgtcttctattcagactgagccgacgcgggtgcacccnnnnnnnnnnnnnnnnnnnnnnnnnnnnnnnnnnnnnnnnnnnnnnnnnnnnnnnnnnnnnnnnnnnnnnnnnnnnnnnnnnnnnnnnnnnnnnnnnnnnnnnnnnnnnnnnnnnnnnnnnnnnnnnnnnnnnnnnnnnnnnnnnnnnnnnnnnnnnnnnnnnnnnnnnnnnnnnnnnnnnnnnnnnnnnnnnnnnnnnntgcacccgcgtcgtcggccggtcttaaacagcgctcttcccagcgactcgcccagctctaaaatgcccctgaagaaaggagagactttccattcccctacttctcctccatccagcgatcgcgaccctgtcttgaacttccgctccctacctcatcgctcggccacctcgttagaatctatcgctgttgccgaagagcgcatgacttccatcctaggccggctgactctggaacccaccgaagaccagagctcggacgctggtgaaagtacgatagagagtgggttagtgcgcagtaactccgagtctatgtctggctccccgcgctccttaaaagaagagggccgcagcattcccatcccactagacgagaaaaagtcccgtcaacagcatagccacgagtccgacagtggactaggaacttctgtcagtagcgaagaggggctcgctgattctgaaaataaaggtgggtgtcacatgccccgggaattcattgtttccctttgttccctattgtttcctatttgagtactaacaatgaatagtgaatgatggtattcatgacaatcaatctgccatcacaagctctatttcggctttcgatgttggttcatcgccaaaacgtcaattaggacccgccgcctgcaaacagattgaacgttttgtgcttgtccctattctgaaagagccccgcttgaaaccattccacgcattggcccgaagtgtcccccagcgcattatcaataaacagattgtttgcttgcgcgacctcgagaaaaccctattgtggttggcgccggtaagtcaatacattgttctcttcaatgggtttatggagttctagttatgcttattttttttcttatacttcaaagaactccgccacttctcggaattcttacctcaacttctgcgaatttacaatccaatgcttacatacttcggcgtcgcacctcaacgatcgtgatcaacgactaccagccgatcgaccttatactaacggatacttccttgaccttgtttcgcaggtccgacgatacgcagcaatgattcgcgctgaacgcgagcgagtccaggcgactcaggactccgagactaacaaggagtccaccccttctatgtatgtgatattccattcgatttggacagcagagcctagctaattcaaaatagcatcccgaaggctactctggcaggcggtctatcccagaatgggaagtctgccgaacttgtaattacgcaagacggaaagcaaatctctctggccactggaaagccctacgaggcggatgtttctagtactaccaagcgtactatcaccctcgatgatgcaatcgatgagggcgttgagcgctctatggcgcgccgcaagaaggatgcccctcccatgaacatcaatcaaaaatgctccgactgcgacaaggtctttaagcgtccctgcgacttgacgtaagttgtcctgttgaatcgaagtgtcggaattcaattgctaacccattcataggaaacacgagaagacacacactcgcccttggaagtgcgagcactctgactgcaactaccacactaaaggttggcccaccgagaaagaacgtgatcgtcacatgaacgataggcattcggaaaagcccactctctacaagtgtcaattccacaagtgcccctatgcttccaaacgtgccagcaactgcaagcagcacatggaaaaatctcatggttgggtttacgttcgctccaagaacaacggacgcaatggcagcaagcgaggctcttctgtccaggccacacctcagactcccagtgtgtctactcctgcttcgaaggcaaccgacttcgcatcgccaatccctggtcccagtccttcacctagcgaccaggcctacaactggcctgagaatccccagttcaacttcgctgaccctcctgcgcttgcccatggggaggatttccctctattcggagaagcatcaccctatttgatgaccgacgttaactcgttcccaacatcggtgaatctgagcggcttccagagtcaattcgaagcgggtgacccgaacggcttgattccagccctggagatgcaccgccagtccatgaactccatgtctattccatctgccgaatcggttcccgacttgatgggacctgtgtcctttgacggatccccgctcaccggcacggacagcatcaacttcgacctggattggagcaatctggactatccaaccaacgaggactacactgcgatggctgcacagcttcctcaggctcatgccctcgaggccatgaagggttattcgaatgactacgaaccaatgaacctcagtcactgttcctacgatgcctctgggaagcccaccggcctctcccccggtgcgcagggcaacgccatgttatattcaccggattcttgtaacgtcggcgacactctttctgagcgctacgaatatggactccaagcccaggccggtaacgactttaccctttataacagcgctcagatggctcgcggcgctccacccatgatgcaaactcctcctagcgaccactcgcctcaataccagcaccctcaacagatgttcccctcactcgagcatgagcgcgctctgcagaacatgcagacctggaatggccagcagccccagggacactacctgcctcgggacatggagctggaatttatgaagtaaaaaggcgggattttggggtgtctttgcaaattttgttttctggagcgcatttaatgttgtcagcgatggaatgcgggttttccttattttttcatatttgattgagcttaatctttccactctaaataacatggctgaagtcctgattttttactttcatattgatggggtgtcatttacttttacgctttgaaataaatagatgaaatgaatttttctatccaactgaaagagatacatatcgtagttcctttgcctcgtgaatacttgattcatttcaatcatggccaggctgtgtagcaatatatgttcctaaacatcacgccagtacacgtagagattaggtagttaattgaatattgactcatcccaatcaaacgccctcaaaccatttatgctccaacgcctgacgcgccgtgatcctttcccccggatcaaaacgagccatggcacatacaagacttttgaagtcatcatcaacaccattccagagtacgaacggctgacgaggggtcttctggttcaatccatcccaagtgacttcgaaaacgcgaacccatggattatcaccaagatgcttcaagaatccattgagcccgtcttcatcagcgaagtaagagatctggcgctcgattacgacagcgatgggatcaacgccctcctctaactcatcttcccgaactgcaaaaatgatgcgcttatgaacggcacagatgcacttgatgaccagttaccagctgcgcttaggaaattccgaatgtgggacttacaacaagagcaaatgagaacacatctgaaggtttgttgacaggtcctcttgcgtgggcttcgggactcctccacatccagttgccggcttgtttcccaaccatatcgcatcctggggggatatgagctgcatcttccagatttccgagttgaactttgtcgacgattatcttgccattgcgatcctgccaattgatgaagacgttgtcttgttttatatctacaagaataagttgtaatccagtattccagggaaatagcagtggaaatacctgtgtgaacgatatcctgatcgtgaagctgagcaagcccggtaagggcatccttaaggattttcttcgttactggcaggggcaagcccttctgagcaagagttaagaggtgacctgtgaaggtttcgaaaacaaacatagacttgttggggatagtgtctacagtaaggcggacatggcttgcattgccacgtaggcgattattgacttcttggagatcttcgaagtcgatgggatgtatgtactttaatatgaaattttgaccatccgctctaaatgtataagcatgtatgtaaatatagggaagggttggtgtctactaacgaggcacgatacacttgacgcggtggagaaacttcctcctgcaaaacatgctcgatagtgtaagtgcgaccggataggcccgtatactgtgtagaaagcagagggttgcttgggattgtgctaattgtgcgatagaaaagacgatttggtactggggacgatgtgcgctggagagggcttaggtacgttgagcttttgtaaagacgactcgctagaagagcggccttcgtgccaacattggaggtagaatacgtgaggatatagtttaataagtgctttggataggcgatgtctcttttcacatattgtaggaaactggccgtggttgacgaatcaggggaaaagcccccttacctgtggttgaaggcaagaagccgagcttacaatccctgttgattggtggttaacgcgtcgacgcggataacatccttggtcgcatgctatttccgtattttcgccaatgatgacatttattattgctccgctccacaataacaaatagccgcaagggcctaaaagaagcctaacggaatccatgtaagcgccagtctcaacctggtaatgcccgtgtacgtggttttgaagccggtgaatcatttcttcgctcaggtaagggaggggactcttgaagtaagaggccttccttagggatcgaccacatacgacgcttttactttgacgtggaggaagccaaggcgcggcgtggtgggcctgcgaatatttacacgtgacgtcaaggccggcgtcaggtgcagccatttttggccgctggctgactatttcatcattgtatggaggatagcaggatgacatatagaatcttacaatatatagcctttcatagccttgtatagccccaatatttgaggtgtcagctaaatattaaaataaattggggtgacgacatcctgtctttcccgacacctgctccgctccccctccacattgtctttcccacatctttcccagtacaaacatcgcgggacaaagcattccattccctggcattccccgctcttcagccctgtcgacggagtagctccgcattacagccccggcctctttaggcagacacattctgtgcttcaatttgcatcacgtgaatcctgggcgtgcaatttagtctcttagggactcagcttccctctcaagtgagcaggagcattaccgctcaacatgccagacacacaatcgcctgattccgctctacctagcggcaacggagatgccggtgcaaccccgccaacagaccaggtcttgaccggcaagcaagaacactgtaagttagagcatatgatgatgatattccgatttcacggtggctgacaggtagataactggcatagacctcaagcgcgagctcatcgcccgcgaagttcgtgctgaaatcttcgaactaaattctcctaccgcactccagcgattcggcgccccattcaaatcggaattcggtgaggtcgccccggtcgactcggaactgcctattcttcggtatattttcgttcaccacgtccggaacttcccgtttctggatcaagcgcgcgagaaggagttttggcaggataagctacaagttgtgggtgctacgcttccctgaatggaaaacggactaacagttgggaatatagttcttggaatcctttgccaataaacatgtctcgtcttcggaggatcgactggaggagacgaagcgccggaagttggcccgcaaatgcgagaagctcgtggagctgatgatggtttccggtgtgccgaccgcgtcgggatatgaggagcgcattcagttctcggagatggaaatcgtcgagcgtggtgctcaggattcgggtctgctggctaacatgcccgagggtaattcaattaatggttgggatgtgaacgtggccgccgttcggacaacctctgtcaagcggacaatgcgataccatcaacatgcagtaagtttgattctgaaaaatggccttttgggagcgggatgttttgctgacaattaatgttgaaggaatttattattcgagttcggcaccacgacaaaccggagattcatattgggaggagatatggagagtttgtcaagctccacaagagattgaggaccgagctgccaggaaaacaactccctcctcttcctcgtaagaacaagtcttcttccacctcgagctggtggggctctagtgcagatgatgatgcttcgtccctttcatctttctctactcaggacacgagtgcccccgaggatcggctctcggcaccaacgctttccacagggagcgtccggcgatcgctgtcccgaggatcaaggcgatcaaccaagtcaccgcgcacgtcaacgagcgacgtgtcgagggcgactgtgctgtaccgagaggagcagcgtgtgtcgctgcgcgcgttccttcgcactgcattgcagaatagtcgcattgcagaatccaaggtcatggaagaattcttgactgcgcgccccgtcgagttgaacgaggaagagttgattgatgtagagaaacggaaaagcatggatgctgtgaggatcgaggaacagaagagattctatgagattgctaggcaacgagcggcggagctggacgtgtacatggagcagttccgccgggatattgtggagagcagtaagtcgccagcttcttccggcgtaacatggtttgctgaccacaatttcagatggattaacaaggctgttcgccgagatccgggaaaagccttcaattgcagagctcagcccgcaatatcagaaattcgccgagtggctccgcattgagtaagttatctgatttcctggtgtttcgccgtcctaacattcaatagggttgctgcaacaatataccatctgttccttgccgaggataactcccctgaactgttttcacaggcgaagagaatccacggcctggttccctacacgctcatgaagaatgtgattcgcatcgccaaccctgctgcagtcatgtctggtgttctagaccttttcatggcccagcccttcggctcgcggtcacttttgcaacgcatcttttcattaaccctaaacgaaagcatcaaagatttccaaaaatcaatttcttctctggcttcgaaggttgaagatcctattcttactcagaagctcaagagcttcgcggatgccgaggaagacatcaagaatgagatccgagcagaggctgctaccgacgatgtcgacatcattgtcgctatccttcgctctgaactactgtcgcccgaactcaccccggaacagattggcaaggtgttcaacggctacgtggcttggaactacgccgtggagaacgtagacctggaaatgcaacagggcgcccaatggttcgctcatatgaagcagcttctgaagctctacacccgccagcgcgacaaggcgatgatgctaagcattgttgaggaaccagtcaccctgcagctcttccgcgatctgttcactatcttttacgagccgctcgtccgggtttacaaatctgccaacgtatacaacagcattacggactttgctctatttgccgacgatgctatcagtgtgattgaaagtgcccagcgccaggatgcctctgccgatccgaaccaaacagtgcaggcgttcatcgacctgtgtgctcgccacgaggccaacttttacaagttcatccacgaagtgcaccagcatgataacggtctcttccagtctctcatggcttggattgaggagatcctcgatttcctgcgcaatggccccgccggaggtaaaatggacatcaatgctttgttccaaggagctgtcggagttggccagatcgacaaagaccttgctctcacggaaatcaatcagcttatcaagtggcaagaggaccggaaacgctggcatctgaacaagactcgccagaagatggctgctgaaggtatatctggggaggctatcccaggagctgcagccttcaggggcagtgatttcggtcttgatgaggtgtgtttttctttgacttcaatatggatttggatttcaggctaaccagtttacaggctgatctagaggacctcactatctcggatgaagcatctgaagcctctgatgaagactctggagatgaggacatggacgatcccattgccgtagagcgccgccgccggtcaaagaaacaggatcagcttcgtcgtaccgcgggtgaacctgtcaagcccgaggtcacggagattctcaagcttgctgatccgttcggtgccatgttgcgacatgtacttgctgattagacgtcgatgttagaattattttgctacattcgtgataccgccatagatatggcttctcccgtttgattcccactatttgattttgttttcatacaccgattcattgcttgcttctatttcttggttgtgctgagggtggaaggactagatagatacagcatatgatcgggccgcacaccagatgcgttatgataattgagaccataatattcacggttcgctgtcaatgtatctctgtagcacctccgcaacctggcgattgccatattccaaggccacggccaccggcgtcttcccctctgcatcactcaactgcaaatcaattccatccgcctcaaggagtattatcacaacacccaggcgaccgctcaatgcagcatggaacagcggtgtccgacccttcttgtcgcgagcattaggattagcccgtcgaggcccagccaacaaccgccgcacgatgtcctcgtggtttctttcggccgcgattcccaacggcgtagtcccatgcttgtcagcaatctccaggtcaaccctgccagaatcaagcaacagcgccacgatctcgtcgtgtccatgctgcgcagcaacaaacaagggcgtctgcttcgtccaatccgtctgcacgttagggttcgtagccttccactccagcaaaaactgcacaacctccaaccgctccgccgaggccgcaatcgcgaacgctccccggccatactgtcgttcctcggcgttagggtcgaccttctctccatagcatttcaccatgtaatgcacgatgtcaacatagcccatgacagccgcatagaaaaacacatgctgacactcctcttcgccatcgtccccctggataatcaggcgcaggtggtcggcaagcaacatgcccacgtctccatcaatctcctgcgcggcacgactgagaggcgtccatccctgcagatttcccacgcgcggatcagcccgtccgctacagagaagcagggggaccatcgcgggctggtagttgacggcaatcatgagtgcggtatcgccaatcttgtcttgctggttgacgtctgtacggctgtcgctgagcagggtctgaacaatggctatgcagcactctttgacggcccaggacagtggcgagcaaagccatttgtcatcgggggtgttcgggtttgctttgtcgtttagcaagagcagtttgagtactgcggggctgttgtaataagcggctagcaggattggggtgcagcccttgagttgctggcctgtatttatctctgtcttggattcgatgtcgaagcctgcggaaagagctttgagggctgttgaggtgttgtcggttgttgcggcccagaagagggatttggggttgggagactttgcatcgcgcttgtacaggtctgtgttgaggagactgtaggttgctgtggtggtgcgcgcgaacgcatttaggtctgatagtgatggaaggaactcagatatcgcgaggtatagttctttggggatggttgagaagggtccctctttggttgtgcgtggtgcactcattttcgcgtttagaggggtatgcaagaaggaggatttgattgtgggagtagtaaacgcgtgagtactttaagaagcgacagcacgtgctgtcaaacttcagatgatttctttatacatactaggcaagcggcgttgaatgggttgagatcaaaccacagcctcaacaatgcatgtcaaacagtctcttctattcaacctgattatagattaccatattatcccctatatctatgttctattcatagtacatcttctattcatgcactgttaacccacctaaaggattttatagatcttctgataatgccaagacctggagtctcgataagagataagccagtttccatggcgacagcgtcatcttccctcttcaacatttgggaaaccactgtcgcaaatgtcgtaccctcagatataccaaggttctccaagaactacttcacgccagaaccgtggcctcttcagagatggcctttggtgctgtaactgcgcggatcggccagtcgctgtccgtcgtgaaactaagaggcatgggccaaacttagggaaatggtgtatgtagaatcttccgaggttctcaatgctcggaaagatatccccatgctcgataaaagtcagcgactgacatacaaaacagtttggacttgcgcacagtcgcgatgcagcttcttcctgtgggcagctgacgctgtaatccgcgaacaagcagtcgttcttgccaactctcgatccgaaaccgactctttctcgatcactccatcaaagcgcacaccaggccgtatgaacaatggactgattactccacaaaccgagcgcaaatttatcgacaccccgcagcgcaacttcaagtcgcctcccaagacagccaaggccagaatgatctcggaagcgtcagacgattttggctggaatgatgactcggatgacgatgagcttatcaaggcactatcttccagccagaccgagaccttcatctcgcaacccaacttccaccccgactccccgttcaagaccccccgcaccgccgcggtgacctcacccggaaagcgcaaattgggcgaaatcacaaatgataagtcttcctacgaccggtctgcacccgcgacgcctttctcatcccgctcctcgcgcaccgagatgtttccttcgtcggcggaattatgcatgacacccacgcctagcaagtacaacgatgtactctctgcggactcgaactttgacacctcggatcttgcaaagagtctactcgatattttggagaaacatagtgttgttttgccaaacagagcgcacgacgaggtgctttcgctgcttaaccggcaggatttgaagacacgggggattatccgtgggcgggatatgacgcggctggcattgaagaagaaggatggcgagattaagaagctgcaagaccgtgtttctaatctggaagctcagagggaactggatcgttctcttattgaggggatgaaaccctattgatgtcacctttggaatcggattgcacatccagcgaatactgccaattggcatttgcattcctactataattccggctcagtgttggtcccatctcacgaactgttatgatatgatagcttgcgacctgattattgtgttatcttctcagcattttgtacagcagggaattatgaccgtctttcatccatatatacaattagcatgcttaatagaaaatataagctttacccggccagtgaatgatttcgtcctacatctcacatgttaggattgtatagatctagataagacgtcacgtggctgataagaataaattatcgcgccgcaatgcgcctcgagcttccagcaaggaacaataccaataggccgaaactgaatactctacctccaatgacccccacagatgaagcttccaagcaggctactccctacgagatcgccgacatgttccgaccccctgtaaatcgtgcgatgcgcacactcgaccggtcatttttccgcagaaaggtgcccctctccgtcgcccgaatttttaaagcaagcgatatctcgaacgtgcggaaggagctggtcaagagccgcgacatactgctctggccacgcattagtcctatccgcgaggcgaaggatgaagatggcaaagtgtggaaggctatgttgttgcgcgagaacctgaagttggatggtaggtttgttgcctggatccgctaggcttgatagatacatgcatggaggttctaatatgtttatagataaggctacatggtcgcctactatcaacgagcttgtaaataagggaacggtcgccttggggccttatgaattggaattggaatatgaccattggtcgtacggtatgcttgacggatgttccctcggttcagtatacatgctaaccttctcatagctgagataatctcatcgattcttcctgaggacctggaagagattcctcaaggcttcactcaagtggggcatgtctgtatgttcgtctgagtcactgctataaccaatactgacgaaacagtgcatttaaatctccgcgcccaatacctgccatataagcacatacttgccgaggttcttatggacaagaacccgaccgtccgcaccgtcatcaataagaccgaagatgtcggctcacacagccagttccgcaccttcccattcgaactgctggcaggcgagaacgaccttaatgtcatccagcacgagcaggactgcgagttccggttcgactacgcccgtgtctactggaacagccgcctggagaccgagcatcgccgtctagtcgagaagttcgagcccagcgagatggtctgcgacgtgatggccggcgttgggcccttcgccgttccagcaggccgcaagaagatctttgtatgggccaacgatctcaacccgcacggattcgaagttatgcaagatgccatccagcgtaatagggtgcaagatttcgtcactgctttcaaccaggatggtcgggagttcatccgttcgtcgggtcggtcgttgctgagcgcggagccgctcactgttactatccacccgaaggtgagcagagagaagcagcgcaaggttgcgcaaggcaacggggtcccgctccccgcgccgaagatatacacccgtcctaccgttgtcaatcactatgtcatgaacttgcctgctacggctattgaattcctcgatgccttccctgggctctatgctggcgaggaacacattttcgcgcctaacacggagcagaaattgcccatggtccatgtttattgtttctcgggacactcaactgacgaggtggatgatcacattgatatctgtgagaggatctctgagcggatcggatacaagatcactattgatgactgtgtgggaggcaagggtaaccaggaagtggaactcgctattcacaatgtgaggctggttagtcctaagaagcagatgttctgtgctagcttccgtctgccgcgggaggtcgcttttcggaaggtatagagttgcatagctgcatgtgaggcgtttggacttctccacaaaaataaaactctgataccctaagaaacatctatcaagtattggtagtaataaacaagtagtaataaataagtacgagctgccttccatcggagttaaattgtattgatgaagcggtaccggggtcaccgccttgaactgccggaagttcaactgcagagatcgccaaacaagtcacctcatctttttacagcaaatacacggcgtcgacgaagtaacttcgggcaagttacttttacaaacacattcgattcgaagcactaagctgcatacccgaatttacggaatcccgcccttcaaaccacacaatgagtgtccaactacccccacccacacaccgcaagcgcgcgctgccacaaggcgagctcgaagccgcctccacgctcaagctaggcgctgaccaacacacacacactctctcgctatccgaagcacgactcgttatccacaaggtgttggagaacaagcggcgcggggggaataaatacgaagagccggagtgagtggacagacccgacgtcgtggtcggatattcaatacttacttgtgatgtctacaggaacctgaccaagaccttggattacttggacgtgtttgcccggttcaaggatgaggagaatatcaaggccgtcgagcgacttttgaactctcacacggaactggagatgtttgagcggtcacagctgggtgagttgatttgcactgccccatcagccaagacatgacattattccatgtacttttacctggatagattgactgactcgggtctctgaacaggcagtttatgttgtgacaatgccgaggaggccaagtctctcatcccgagtctccagaacaagatctcggacagcgacttgcaagaattgctagatgaactgaccaagctgcgcaacttcaccgagtaaagcatataggggattgcattttgaggatgtttcatttttaggagcatggagttttgacggtgttctttttttttttttcagtgatcgattgcaggatgttggattaacaggccataggtactcgggaattggtgattcataatagaaacctcccggaccaaccattgccgctcctttcttattacatcttctgccaagtccgtgctcttccgttcgccacagtagcattgagcatgtgccggggaacaggatcttgactccggggtgttccactccggtacaatctattttaatgtattgtattacatatcagattgcatagcggtcagtagaaatcggaacaacacggaggagatgcatatagtgcagatacaatatagtacatatagatagttagccgagtatatatctaatgtacatacaacatgtacgtacatagtcttagcctccctccacattgcgttctccccacacagttcgggcgctactgcgactttagtatgggacggacggtgattggcccggtggaaaggcgttatcactggccgctgattggcccgggcgatccttggacagtcgaccagtcagaaagccaattgacgcaggaaaaggacgaagggagctatgttgtaacggtgatatatatcattcgccctaaaccgccctagatacagtttgaccaaattcaatctcacttccatggatgccctacgtgaaatgatgacctaacaatattctgtacgtaatgcaatgtctgcattcagaaccaatcagcaagggaccgcttatcgttgacaattaaagtgtcataattgcccgtcaatggctgctcgggcgggtttccgttacgagagcaaaaagctgatcgtctggttgtcgggaaagtaacgagtttcgggattcatccatagtttatattacctattaggtcgatatgtcattgatttccctcttttccttccttctccctcacttaccacatctcgtaacggctaggaatgacggagcgaactattcgacatctcatcctgctgcagtcacttgcaggctcatccgcctgatatatctctgatctccggtgccggctctggattatcagataacacacctgttttccctgataagcgtatgtgccgggcttatcacgacgtgatccaatgactgacgccgtatattcagaaaaaagaatcccaagagattgcggagttacacgtctggagcacaactccgtgctccgtgaagacccttatcaccttcgatctccgttcctatttgcccgtgcctcagggctagctccggtccaccgtccacatggctaccgttatcactctccagccgggatattcccaaacccattctcctgatctccgccgaaagacgggctcgaccccagtgctctctccatcccccatctccatcaactcgaccctcccccgcgcacggaatggagccagctgtgacgcctgtctccgcagaaagagcagatgtgccatgaacgaaatggtcaataaatgctactcatgcgactttcatcgccaagagtgtaccttctcccacactcacgagggtccgtcgaagaagaggaagttggacggccaggagcctgcagaaggcattaagcggtatggcattccaaccgggggatatacgcctcgatatgtagaaagaaatcgtgccctaacaatccccagaccttcaatgcagcactgtatccccgagacggagtctcacctagcagtgaacatgattcgccccgggttttttaaccaatcaacccagtatatcggcatgaccacggagctggagcccaccttgctggattatctgccactggacgaatacgacgaatgcaccgtggccaactcgcgcgtgcggagatgtgccgacgacggcaccttcatgcgcgtcgtcgacaccgtgccggactcgcatgccgtgtcactcgatgctatcgagagcatggtcgctccctacggctccacactgatcgagaagttctttgagcacgtgcacccctcgttcccgattttgatagaggaagtgttccgccaatcataccgcgagcgccgtggcctctcgccgctactcctcgccgcagtctacgtcttgacgttgaagtttgtcgacgtcggtgtcacctcgcagactgcgcgtaagcccgatgccgcacgactagaggcttcggccttgaagctgttgatggattcgttgcaattccccagtgtatccaccatccaagccgggctcctgctgacacaaaagtcgactctcgctacggcatcgctaaacggccagctggtcacggccgcgttcgagctgggtctgcatcaggactgcacaaactggcgtatggagacctgggagaaaggcctgcggaaacgtctcgcgtgggcgttgtatatgcaggataaatggtcatcgctggtgcacggccgaccctcgcatatcttcgcgttcaactggacggtcaagcatctcgtggagcaggacttctcggacgcctttgcctccggcactgactcgtcacacgatgaaaccgccgtcggccacggccctctgcttttctgtcacatggtcgcactaaccaccatcctctccgacatcctcgaccggttctacaccctgcacgccatcgaggagttctccgccgccggaaaccagcgcacacgcatgatcctagaaaaagccaaaccagcccaaatccggctcaaagactggttctcctccctcccagcatccctcaaaatggaaacctccaccggcgaactcgtcgaaacaataacagacgaacacgcccgcaacggcgccctccacctcgcctacttcgccaccgaaataacccttcaccgctgcatcgtccgctccctcctcgccgaaggcacagaccagtacctggcacacatctgccgctccgcagccaaaacccgcctgatctccgccatggacttcgtcaaccgcctgcgccccgcccacctccgctcgttctggcccgcctcggcccgcaccaacttctccctcatcggctccttcggcatgctgctccgcatcaccgcgccgacaaacgaggaggctgacttctaccgcgtccggctgtgcgagtaccgctggacgctaggcgtcagccacaagaacgccgagttcatgggcttcgccctgcagagtctggacaacgccaccgcgctgcacaagcacgtccctgcgaagcctggtatcgccgagctgatggcgtcgtctggtaagaatgcgccgccgcgcatgcctcctaccacgcttagctcttatgatgacgctatgatggaggctgctggcacggccgcttcgagctcggttatgtcgggtctggcgtcgccggctacgtctattagtgatatggaggatggggaaggggaagcctctatggcgcccctatgatgatgatcccgtcaacctctctcccatctcttctcctctcttctcttcatataccttactccgtcccccctcgcatcccttacctcatttccagccctttctttctttcgttgatgtcttctcacgactcccctttgctacggcgttttctccggaatttgatcttgttcttgatttcctgggatgaagcgcctgatttacctatttgaaatgattgattatgttgtgcatgtacccccatgtactcactgcttgccttgccccgcagcgacactaaaattcgttacctactttttgctatgacggaattaccctggctttggaatgaatgcatatatggtctggattggaccggattttgttatgttatgctatgcttgctttgtttcggggtttgttttcgccattgttattgttattagacagcctatgtatatagagtggatgatatgaattatgattttatttgacgatcctgttcgaggacgacaccactcaataacgctttcatttcttgctcttcacgctcgcactatttttttggttttcgtctgtggcggtgtgtggttgaacacaacgataccgtaacaggcaaaggcagaccatccgatgctgactcgatcaggttggcgtccgttacttgccaaactccccagagagagatggaccggggtttgcggatatcatcgagtgttggccagtcagactgagggatcctagtaagacgactgtcagtaatgctcgtagataaaggaaaaggaaaagaactcacattcgatacgacaagaatcgacttgtccgacgggatagttatatatggttgccattttgagtatggcgtttgtaggacactcaacacagctcctcatcattggcagcgaactacttgactagctgctggtgctggtgctagtggtcttagtcttggacaggtatgttcgggcgcccagacgtgttggtgtgttatcggagctactgcagtgatatcattgagacaagctttcgtctccaggtgtcttatcggggttgttggtgtcaagactcaagactctgggatggtattgtcatatggcaccatcgactatggttttagtcacatcaacttcagcacatgaatatggctgctgcatattgcacggctggggcatgggtggagcaagccaccattgttcaaaatgaacagcggtcttcttgatagatatgataaccactatgtttgcttctcttagaggctctgaaccatcatctagatttcgaagaagtcattgcaggctctcggataagcccgtttcaacaacaacggtaggccattgcaagctggtactagaaggccaacgtgaagaggggctgaacagattgtagcccaattgggcagtgttgttagactgttgattgttggatttggatggtcttgagggaagactcgaggttctgactttgtcactggatagacgtcttgggtgcgatccgggccattgacgacttcaagcgtgttgatatcttcagcttgagtttctgtgaatcatcagtaaatatatgatgatggtttaaaggaaacctgaaaggacactcaacaggacctgaagaaacatacctgaaaggattgctgaaaaggtccaacgaaaggatgatgggtgatgggtaattggtggcgcggctgcagcaccacctaaatagatatatgtagcactggttaccagtgccgcaggatgagatggattggaatcctttgtgtcatttggcagtcgggctgtttcatgattagctagagatacggtctgaaggtggcactagccatgacatacatagtagtccgcgtagattgcaaggaaaggcagaccaaatgcctagagaatgacttgggtgacccattgcccatcggtctctctaaacatcgctcgtgaagtcgaaatacgttggtcaatgcgggtgtcgatgaaaagaaaagtggaatttggggacccttctcgaatgagatactcctagaatgactcggacatgctactagttgttacactggtagcaaaggagggggagggggagggggatgacgaagaagtgtgttgaagagagtgaagagagttggtagtggtgtggtgaaataagagatgtgaaagtgaggataaagtgtggtcacgtttaccttaccttggtcttgtgtttgctaagtgctagtgtatttgctgtaattggtggtactaatagcagtcttctctcagtaataagcgacggagaaacataggctgggatgatcttgttcatttgatacgcttggtatactcccaactaaaagaaagagaactcatttccacctccaaaggcaaaatcctccaaaacactcggatccaccaaattggccagcatctccgcccgcgttcgatcaggttgtgtctgcgtgccgttgctgaagagtgaaaagaagaaatccccgtcctctggatcagtatgttggtccataatagatgatggggtgtcgagggataatccgtgcgtgggtgtaaatgatgccgctggtagaccgacctcgcctcctgttggcgttgaatttggaattggatgcttccgcgttgatgtggttgcatctgcagctgcttgtgatgaatttgagactccccctgatgatgatgtgtatggcactccgagtctagagtactggctttggttttggctgtcttcgctgtggttagctccataggcagagcgccgtcttctagccagacaagtgcgcgcaacttctagtacttcacggagcatctcggcgcagcgacgggcgacgataatatcgcccatggaggagaagatctcgagggatttttcgacgtcttcgaggagttcgtcgtctgggagacctgggtagtttgagaggatgagatggaggagaatcattgacccgtagagtgcgtaggttgtgttgtaccacctgtttcaatggtgagtttgttaattgtagtttcttaggaggaaaaggtggtggctgaccatgtgcgaatgtagatcctatgcatgaatgactcgtattgcatattgatactcatccgggcagcattgaggcaagtatgtagatgggcagaaaggtctggcgaggaaccgtctgtatttgcagttgctgccaaaaggaatggcttgtggatgaggattcgagtattgtaatatcctagacatggtacgatcaggattctttctaggatctgctaaatcggagcacggatcatgtagagggaactcactcagccttaacaccaatttctgtttgaacgcccattcagggtcattcaatgcaagtgcatctagatccaagaaagccggcagtgtcgccttccattcaagaagtcgctggtcaagtgccatagccagacgggacttatcggctattgaccgccgcatggagtggtacagttgatgagatgcttcagacatgatctgggctagggcaaccatggccgggatcatcgctatgtcattgtcttcggcatcagggtcgaagtcatcggtatcaacctggtactgtcagggttgcaccgtgcgaattgaggatggcacctacttttagcttgggaagggaggtctggtaataatgcaacgctttcatgctatccaggcgtccagaggaacaacacatttctctaggatcgacgttagtatcatcttcgggagtacgatccacgagatagacgctcacatctcatgagagtagatacacctaaatagaagcgtcaggttttttattcatcctagctttatgttcatgcttaccaccaggtacgcctagcttctcgtctcgcactgggaggcagagaagacatgctcgaaccgagaccaatagccgctgctgtgcggacagccatcccgctatacatataacagctatggggctgcaacgaattttgacgaaacacactctaggaagacttgtcagcctccttctgatgtaaaatcgacatggacgtaccaaaagaaggagagactgggcagactccaaacaggaactttcaaaaagatcacccagagtccgttttgcgaggccgaagaagtacttcgcaaagtcaagggccgtgaaccccggtcccccccgagctcgtcgtgtttgacttggatcgacaaattgctgacagaaatgttgtagtaaggaggtctcgttcgagcttgcattgatcgcgcccagagcaacgaccgcaaagtatagcccagcaaatttcgtggtacctcggaaaagtccctggcgatttggaactgaccatgcttcattttcacatcgttgcataaaagtgcctttcgaaagtagtgggtggatgtaatgcttgttcacaaagtagctgctgatgaaggttttctcgatctccatctgcgcactctctgtaaggcggggaaataaagcttctagactgatgtcttggtctgttaatccggtcagaaattcatacgggctgtgataggcattgaaagacaaagggaaatctaccattattcactggaggggtcctgttttcgagaccatctgcatctggcggacttctctgtgctgcaaagtctgtcccatcatgggattggggcgaaggatgcccgatatagtctgcattgtaaagtaaattcacgatggagagttgtgatttgcctgacctcctgctacttttgtggctcgtttctcgcgataaaggctgagattgaggattagtataatccggtgacgccggaatttgtcgaggagtctcatcgggacgattttgatatctgagctcttgattctgtgctcttgcgtatagattacccaggaatgccaggtttgacgagttaccatagaactcggtcccattagtatgcagattgaccccacttagcccatctcttgacgcagcatcaccttgctccgaatttggcactatataggtggtcagtttagttattcgtatcggagagggcggtgcccactttgtgaagcgtcggatcgcctagccgacgggatcgttgatctgggtgggttgttgacagcataaggtcggcccctcaacaaacttggagactgggcctgcgaagaagcagtatacggcagtgacttttcggggtcgttcgtgccttttggtgtctcggtctgatatatccccggccatggagatggcctggcgctactttggctttgcccctggttagagatgctcggaaaaagatttgatgaaaatcccaacctttggtcggattctgcaatatctcgttttcttttatttgaatcgatgggggttccgcgcccaccagacgtgcggaatacgcagtcaaacgagtgatctgtcccgggtcaactactacctcggcatttcaatacgtgggactaatacatgcgcaataagaacatggttgggcttgatcacactattaattgtcagagtggacttgctttccgaaagggaagctaaaaagagactgcaatttcaatgtgagctttggcttaccttggtcttccgagcacggcaggtttcacatgcccgcgaggcccgcggcgcacgacgttgcgaggcccatcgtgctttgccttcaggcgcgtccatgcttattatagatctctgcactttgagaagcggacggtgatctcccctggcctagtctaatgagaaagaaggtgttggcccgagtggaagtggaacacccctttaccgaaccaatcgccaatcttcaacttcttcactttgcgtggggattttgcggggtctggggaaggcatttggtgttaaggtctgtttggaaaagagaatggaaaagggaaaagaaaaaaaatcatctgttatgatctcactactactgggatatacatctaggacccagccatgatccatatgagaaggacagctacttcctatcgttacagacttggaatatagtattggaatattaagtctacttaactataactagctttgacttttacttattaaagaataagtttgaatgatttgaataccaacaccaatgtcccgtatgctgttccgacggaaggcgatcttccgacggatgatatccgatatactttgctcccagcacattcttcgaaggtatagttagtatagagtatattatataaaagcttaccaggcagagagtagttaaatagctagtacatgtacgcagcggccgcagcctgactagagaccccacggaaactcttgcctaatgtgcggtgtacttctattaggtctacatataaaaggtacacccggccaatcatgaatctcttgactctcgaaaacagaataattgtacactcggaatttgaatcgtgagcatttaaagagatctcttctacaatagatgatctataaagaatgattcatatagcatgaacattttcggaggctgttgttgacccttcgttctaagaaactgattggccgtaagtactccgtgccttgatatcttatatcaagcaagagtctccggttacccaacttcctatatttaaacatacaaatcgagtgcaactggccaaatgcggacttatctccccgacggaagccgttagatagcgggtaaacatggcgagttggtatcagctgctttgagtcaatgcacctccaacttccaaggatataaaatgagcggtctcttctttttgataggacattttgtatctaatacttactaaatattataacatacttcttcaatataacgtgcctcattcctcactattgatccgatcagcattcacaaacctcaagatggccttcgatcagaacactttgcgatcgcgcttctgtcatgagctttcggaaatgtacaagagcgaagtccctctttacggcgatctgatcgatgtagtctgggaagcagacgcaaaaacagtccaaaacagccagaacatcgacggtgctcgcgttataaacccagacgatattctacccgcccggcatcgggttgaaagacacggagcaatccgactgggaacagcgcatgagctagctacaattcgtcgcatgtttgctgtgatgggcatgcacccagtgggctactatgacctcagcctcgctggattccccatgcacgctacggccttccgaccaaatacccaagaggcgctcgataagaacccatttcgcgtgttcacgacggtcttgcgaatggatcttttgacagaaagaacccggaaactagcacggaaagcgctagagcaaagagacatcttcacgcccagactgcttgctctgttggatatcgcagagagccagggttttctgacaccagatcaatgcacagagctcatcagtaatggtctagagacattcaggtggcactcaaaagcaacggtcagccttgaagaatatgagcagcttaaagctgagcatcctctgattgcggatgttgtctcttttccaaactgccatattaaccacttaacgcctcggacgattgatatcgatcttgtacaacgattgatgttggatcacggcatgcctgtcaaggatcgtattgagggaccgccaaaacgatcgtgcccaatccttctgcggcagacaagcttcaaggcgctggaggaaactgtatatttcagggatccgtctggtttctatgtgaagggctcccacaccgcacgctttggtgaagtggagcagcgaggctacgctttgactcgagaaggacgccatctctatgatcgaatcttgaaccaagtcaatgcagaagctgcgaaggatgacttgaaaggagaggcctatgacaggctactagaagagcgcttcaaggagtttcccgatagtctatcggaccttcacgatctgagactgggatatttcacctatcagttgacaccaccgggcgatcagtcggttaacgaaagcgttgtattatcggagcaacttccttcaatctcacttcaggatctactcaacaaaaagatcctgagttatgagcctatcacatacgaagacttccttcctttatccgcaggagggatcttcaattccaacttgggtggtgtctcccagtccaagcaactgataatgagcgcggatccggacctcgatggtttccagcggctccttggggcatgtgttgccgatgagttccatctatatgccgagatgcaacagaaatcgttggaaatctgtaggcagaaactgcagttgaagaagattatagtgtaggataagcgctttgtgataatgtgataatagcatctgtttcaatcttcagacaagtagttggttgctctttgatattcacgtttatagcgagcatcactaatggcatcaatacgaagtatcgctgctgcttcacttctacctcgttttcggtgttgtcagatgctttcattaggtcctccgggcctcgacgatggtatgccagtgtatggtttatgcatttgccgagaagactgcgatgagattgggcttgaatgaaactcagcgttcatgtgacggtgacgggccctacactattgcaatagagagatcttcagaaaagttcaatactatagaatacaatgcatacggaaaacagccatccatctatctgtacaatatgccgcaaatatatcaatgcatcgcggcaagacaattaccaacagcccaaagatcagaccatatctcgactagtactgtcaatacctcggaccactgtcgtgtcatggtccggcatcagattttgccccaaaagcttctcccaaacaccgaacaacccaattatgaccggggttcaattactgagctgtccgctgcgtcatccacgatcaccgcgccttccgccaacaactcatccggcgtcttcacccgcacatccatgacacgcatgagcgtatagcggtgcttgctcttggcctgcttcacgtgccgttgtctccgcttggtcttctccttgatgcgcagcggctccgcatccacacccgtcacacgaacgcggcactcgtagatacgctcgtcgatagtcggtgagcccttcattgtgaagtcgcgggatccgagtgccgaagcgcggttgaagcgcagaatatcgcctgccttgaccttaggcatgaggaagggcaaccggatgtgatcaccttctgtcaagaggtatggtcgtgcgtgcagttgagcaacgatgtagtgcggcttctggccggcaaggtggggaagttgtgacatgagagatttggtcacttcgagaggggaggtgaaagtcggggcaacgggttgttttgcgatgggaacgtgtgcgcgtgtttggggtgtcatgatggtttcgtcaaaagtgggagccttgacacgagtcttcggttgggtatcttgcgcccggggagtggcactgagaggtgattccgggtggctggaagccgattggctctgaggttgcgagttcatcaaagatgcactctggtgaaggcatgctcgttgctgcaggggagcagcggatgagattgtagatggtgcagtccaacgcacttcggaggccaggccccgtagagcagatcgtgagaacatagtaattgaccgcttgtcaatactcaattatcgagagtgagagtggttcgcagtggtcgatattcgagatagaagagcggcatccccgtaactagagaaattcaacttgcgcgaatggccgctttgtcgcccgtagcatcacgtgattatctatcagtgacttgaggatgcagatttgcagcgagaagagaccaatattgtaataataaatgatataacctgatagaaagtcagttgccttaaatgttcaatcttctaccattgttcaatatttctttttcaatctgaataagtcgaagaagtcgagaaacgaccttaccgataaggagcatcacgtggttcgctatcttttcccgcatcacaactttttcggtctcgattagatcttcaaggcaagaacttcctcccccattcacctcttgttgtccattcgtcgttcatcatggtaagctccaaatgattctctgacctctcaatgttcaatttcttcatttactaactttttttctgcctatagcctcagaacgagttcgtccctccccgccagccaccgcccgatctccaactgacattttcccaggtatatcgaacgctggcagaagcagcacggcaagcgcctcgatcacgatgagcgcttgcgcaagcgccaggctcgtgagggacacaaggcgtcccacgatgcccagaatctgcgtggtctgcgggccaagctgtaccagcagagtcgccataaggagaagatccagatgaagaagcgcatcaaggcccaggaggagaagaatgtcaagtccgccgcgcccgacgagccttccaagactcctctaccccagtacctgctcgatcgctcacaggagaccaacgccaaggccctctccagtgctatcaagaacaagcgtaatgagaaggctgctaagtttgctgttcccctacctaaggtcaagggtattagcgaggaggagatgttcaaggttatcaacaccggaaagaagacccacaagaaggcctggaagcgtatgatcaccaagcctacgttcgttggtaacgacttcacccgtcgccccgtcaagtacgagcggttcattcgtcccatgggtctgcgttacaagaagtgtaatgtcacacagtatgttttatctttggagggagagcactcaccctccggttcatcttggttggatatggtatattgactttttcttcagtcccgagctggctgtcaccgtgcaactccccatcctgtctgtcaagaagaacccccagaaccctctctatacccagctgggtgttttgacaaagggaacaatcattgaagtcaacgtctccgagttgggtctcgttaccacttccggtaaggttgtctggggtaaatgggcccagattaccaacacccctgagaacgacggctgtgttaatgcgtgagttgcttcgatcaattattctattctttatatacagctcaaactaacgtaaaatagggtcctccttgtctaaattgaccacaagcacttcctccacattcccggcaggcacccgcctgtcttcgataccatgctcaggcagttctatatttccctttcttgatacatacggtctcaagactgtttcattcttgggcggtgttaatggcgcaaagtcaagtccattgatttcaaacgaaaagtattccgcatgtttggcttcttaatggacatagctagtttttagatagtcaggcatttatcaactatgattttatgaagaagcagcagctccattgtaaagatcatggatcaaagacttccaaataacccacaggataagaaacgcaatatccaagtaatgaagatagacaaagcttgtcaattaaacatcttaaccaaatgaggagttattgtcactccaaaaacgatggtactcaagcagtatccatccggatgcaggagaaagatgaaaaggctaatgaaatcatatacaggaatgaacatccacacgctgcgctgaaaccgaaattcgtcaaaatacccaccacaagacaacgtggttaggtcggacaatcaacccggaggatgatgaagaagaaagagaagaaagagacaatgcaaagaaacagacaatcagatatcccgcaaattaaccaagcagaccaagacagaaagaaattaatatatccaacaccagtcattaagtcgttctaaccaagaagggatggggaaaagccgataaggcattcaagacaaaggaaataaagtgaaggagcggctgggtgttatcatgcgttttcttcttcgagggctgctttgatttttgcaaagaagcctgcgggccatgcagctagctcctcttctctgggcacaccgcgagccttgcagtggttgacgacgttgaccaggatacgaccaagcatatcctgggtgactgggacagcaccctcaagctgggcatcggggtgcaagaagggatcgcgtgggccaagcatctcctcaatagttggtcggagagtctggtcacgctgcagacagcgcttgagagtccggacaagaccagggggtactggaatgccaccgacaccaaaggccgggaaatcgatttgtacacgggggttggggatagccatgatgcgttcataatatttggcgatcttggcgaatggtggttgtccgtagaccatcttgtacagaatacaacccaaactccaaacatcgctgggttttcctaatttcataacttttccaagacttgaaggcagaccgagggacacgttggaatcaaccaacgcctcgggggacatgtaattaggtgtaccgacttgctgttcacgatgaacgttgactgtattatcttggatcgcatttgcaattccgaagtcaataagcttcaaccggccttgaaccataaggaaattagccggcttcaaatcggagtggacgatgttgtgctcgtggacagcctggacacactcgagcatctccttccaataaaatcgggtaaagttgatatcaaaaacagcatcttcagcgtttaaacggtatgtgagaatcttttcaagatcagactctccgatctccataagcagactcagagcatgtttgtcattgttcagctcccagtcaaacaggcgcaccgcacggtccacattctccaacttcttcaacaggtcgatttcgcccttatatccactcaaagtcactggatcaacatcttcaatattgacacgcttgagagcgaagatcttgtaattctctgccatcacccggtagacacgggagctaccgcctcgaccaatacaatcgagtcgagtgaaatgcttgccattaattgagacttgactcttcttttttcgtgattgtgatgtcgatgcgcctcctgtggatgtggcagtctcaaggactgacattttcggaggaggaggagcggccctatggggggtgttgttgcttcgcgtggcaagtatctttcgtgcagagttggttgctggggtctctgctatatcgttcttctcggtatcgtaaacaacatgatacttttcgggtttatccagcatactcaacccttggggctttgtacgccggaaagttggtggtggttcattctcttggtcacgtaccgatggcaaagccggtattgaaggaaccttgaatacaggttgttccttcgcaatcgaggatttagaggacaaatctgatgaagcgggagtggactttgagccgtatgattttggcgaagatgacctcgaaaacggcccttcgacctcagcagggcggagaggatattctcgtcgattggattcacgcacaagaggcgggcttgggtcagcccatgacactttaggggatgaaggctttgctgaattgcgaggtcggtattcggcattctcctcctctccttcgacatcttcccggacaccatcagctgagagatattggtgattttcctcgttactctcttcgctctgacgtcttagcacgcccctccgggctgggccattcaagaaagtgccagcaagccgaccaacccgcttgacacgtaatgagctgtgtggagcgaattcttcgccgccacggccccgcagtgcagaagaaacgccatatcgtagcgctgggtcatcttcatattgcgatttccgatcactatccgagcgctcggcactaccatagtaatcgtccgaactgcgttccgacgagcgctttcctgaaggcgagacagaggccggggatcgggtgttgctgcgcgaaacgttgatacgaacactccgttggcgtggggcgggagtgataaaatcatttgggcggctatggtgctctggttctgcgctctggctatttgataatggagagccttcgcgcgagaatcgcgaactcgacgacagagcccctacacggacgactcttggggccggactaccattagatgagtcgtgtggggacgaattccggggtgagcggctttgatgtcttgatgtttcaattcgaggttcgtgtacgtgtgccttgtgtagatgaggcgaagaacctaatccatctccatgcaacaatgcttttacagaagcgctgaatttaggttctgggacctcttcgtcggagctgtccccagagtaatgtttggacatagcttgtgttgaaggagatacccgtctggaacccgagcgtgaaaccgcggatcgggacatcggtcggggtggctgtcggtacagttcattgtatgctgggaggaaattcggggatgccatgccgctaatacctacattgaagttgtgaatcaatgcggccccctccaaagttctccaaagttgtcgattgtttgttgatcttggagaaagcccaggctcggggtttcttcgcgggcgcgctatatagtcacgtgcttgttgttgctatggcgacgtctgcaccacaacatgcggacattgaaataattgattctgggcttgaaaagaacattgaacacgaaagatggatataactctagccaataatagcccatttttctctggtaatgtggtccagtaccttaagtgattccaaagccttgggcagttaaagatcggccagatagcctccacttactgctatgtctattccgtagactagactgaacttgccgttgtcgtactctccggctatcaggattcagagtagcctagtatagctttggggtggttgaccataaatctatataactactccaaagaatgcaaaattgtgatatcctcttagattatatgaccttcatagtgcagcaagattgtaaggaattaattctatcactctatgactgtaaaagtactacagagtggtgagttcatacaatcatagtgatcgttcattagggcacatatatacttcaagaaagaaagataaagaatcagcttagcataccattttcttctcattttcttctcaaagaagatataagaaagaaagaaaaaatgattgcagacaagtataggccaacagattagccaagaggcgtttttccccacgtaggtaatggatgtcgatgttctgactgtgttcagactgtcggcgagttcggaggcgaaatatccatctacggcaccggcgagtgaccatgaatgcagttccaacacggtgaatacctgtcttatgtttgctcatcaaggactctcctaccctcaacttggattctagcaaaaatggcgtccagcgtagatgccaagctgatgaggcggactaagttcccccctgagttcagcaagaaggtagatatgaccaaggtcaatatcgaagttatgaagaagtgactttccccgggcttttttcggtatctccggtttactgacattgctttttctccgcccacagatggattgcaagtcaaatctccaagatattggggaacgaggatgacgtcgttatcgagctctgcttcgcgcatcttgagggggcacgctacgtaagtggtgccgtcggatatttagtgtcccaaccctagtttgctgacatgtgcttctgttctagcccgatattaaatctctccaaatccaactcaccggatttctagacaaagataccgccaagttctgtcaggagctgtggtcgctgtgcctaagcggtcaggccaatccacagggcgtcccgaaggaactcctggaagccaaaaagcttgagctcatacaagagaaggtgattgtaagcgtgctctcgaccttggatattttctaattaaattacattacagctcgaggccgagaaagccagcgaggcacttcgtcgccgacgcgaacaagaccagaatcgcgaacgagagctggacgatgtgagacgccgcgagcgaccagaccgtggacgtggaggaagaggtggcgatcgtggagatcgcggtggccgtggaggtcgaggacgcgacttcaacagacgattctcgcctcccagagaccgaaaccgcagccgcgaccgattccgtgagcctccattgcgacgcgacttggactcctacgtgccacctggtaatcggcgccgccgatcctctcgctctccccacggcacccgttctccatctggaaccccaaagccgtcgtccccatctcgccgaaaccgcgacgaaccacaccacagacgacgcgaacgcccaagcatctcagtctctcccgagcgacgccgcggaggagcgagaaggcgcagcagtccggattacggtgaccgtgttaaagcaagacccatttcccgcagccgttccccgcgctcacgttcccccagaggaaaccgccgccgaagctccgtctctcgcagccgcagtgtatctcgctcgcgatcccgccgcccgtctggacgttatgcccgccacgattcccgtcgcttaagtcgcagccgcagccgcagccgcacccctgaccgtaccggtacacgtgatcgtggtgagaaccgtcgacgccgcagccccagcggtgatcggcgccttagccgcagccgcagcaacagccccaagaaggatactgacggcaagcggccgctctctgtggaaagagacaaccctgatgacaaacgacgcaagatggctgatgagaatgaggtctcctctacccgaacccctccgaaagctgatgagccgcccaaaactgatgacagtgagacaaaagttgctgagcaggttggtcattgagaatagagattcctggtcaacctccaccttgtatcctttactacccagattcattcctatttaatgttcgtctaaacaattcacatgtcatttgtttctcaaattgctgtgttgaatgatatactaatgaaccttcaacgctcagactaagaaaccgctttctgtttggacacagtcgactgcattccgtgagaaattactccgggagagatgtattgctatgcgtcgtcaggctgcccagaagccgagcagtgcctcacagccaaagcaggactaaacgagagcacgagtgtgacttgaacgttgaaatttacgccgactaaatgagtgcgttttagcgcggtacatgtgcggagtactttaccattccaattattcttttatcatgatcgacatgctcttttatactgtaaggtggaatgttgggttgatactggggaaggtgacagtctcctaaattgtagctagtcttagccaactagttagtgtgatgagtagttcagattaagatgggaatgtaatatgaaatgaacatgatcaattacaagatatccgaagactctaaccataaccattcaaaagcacagtagattacgatgtacgatatacgtaagaaacaggatatatcaatctccaccgaagcagattagaattagaattatatatctacagagaggccagaggcggagagccggcagatcgggatgggcagccaccaccccacgtgttatcaaaaatcatcttgtcatggaaagggctcaaaaaaggcaaattaacagtattgatgaaggagaatctatatgagagccctcagagtcgtggcttcggaattatgtccaggtatattggtgtctgctttactcgcagccgcagacggtggcagtgacagtcacggtctcagtggccttgccggagccagtgttaccgccggagggaagggtggcggtaacagtgacagtctcggtgacattggaaccagtgcttccaccgctggggatggtggcagggctggtaggggcaggggccgatgcagtgacgccggaagcaccagtggtagcagcggtgccggtagcctgggcagggacggtgacggtcagagagccggtgccgctggggtgggggaccacgatggtggtggcggaaccgctaggggcagtgctggtagcctcggcagggacggtgacggtgatggtggtggagctggagccgctggagccggggatcacaacagtggtagtcgaggcactaggggcagatccagaaggaacggagccaccgacaacggtggtaccggtgggggaaacgccggtagcctcggcagggacggtgacggtgacggtggtggagctggagccgctggagccggggatcacaacggtggtggtcgaggcactaggggcagatccagaaggaacggagccaccgacaacggtggtaccggtgggggaaacgccggtagcctcggcagggacggtgacggtgacagtggtggcgctggagccgctggagccggggatgacaacggtggtagcggttccggtagtggcagatccagcaggaacggaaccactgacggtagtgccggtaggggaagcgccggtggggaccacagcagggacagtaccggtggcgatggcagggatagaggcagtgagagaaccggagccgctagggttggggatcacagtcgagctgacaatttccgaggtctcggtggcacagggggtgctggtggcatcggaaccggagggaacagagacagagccggaggcggcgggaacactggcggaaacagtcagaccaacggaggcactggcaccggaaggcacggaggaggtgctggcgaggtagggggtgctggagggcaggctgaggacggaagacgaggcagtggcggcgggggcgccggggatgctgcagccggtgaaccactcgatgataatgatctggatgctgacgtcgatgttgagggaagtgcagccactgaggaaggcagcgagctcagtacgggcgctgaaggtcaggtcaaggaggctaccgccggcagcgcagagggaaagggcaccacggaggtcgacgctgagatcgtcgacgatatcggtcaggagaccagtaacatcaccgaggacaccatcaacaagattgagcgcaacggagacatcagcctcgacggcgaaggagagccaaagaaggacgacagccttgagttcaacgcccagagagcagtcggagctggcgagccagatggcgagcttggtgcggacgtcaagttccacagcggtggcgagttcgcccttggcgcatgcctcgagagcgagcttgacatcagcaccgagagcaacggcgagatcaacgcccaggaaggcggcgagggaggcctgaccgccaacggacaggaggccagactctaggacgtggatgccaacggaggcaccaacggagacggtggagagagcagtgtcagcaagagcaccaatctcaacaagttcaccaccagcacggccattgatccaggcaaggaccgaaaccttgaggtcagcgctgagctcacactcggtgctgttgagccaagcaagcagggaagccttgatgtcagccgacagactgccgacaataccaccagcggcgcagacattcagaccgaccttgatgtcgacatcaaggtcaaccttagcctcaacccaagcggagagggaagtctgagcagcaacgctcaagacaagagcagactccaggctggcggcctcgaagataccgtcgatagtcacgtaaagctgacccttggcggcgatgttggcagatccggggatgtagacggacagagcagcgaggacgtcggcggagaggactagctcgtcatgaccgtcacaccaggcgatcagggaggtcttgagggtggtgtcaatctcggcgtggagacgcagccaaaccttgagggcggccttggcctttgcgtggatggcaccggccttgcagccgagagcaccacccgagagagcggcagcaccctgggcactcagaccagcgaagatctcaacggaggtgccttcgaggacggtactaaggataccagtcacgtcgagggtgaggtcgccgaggagctcaccgaggagatcgaggttacgggcctccacagccctatcggtagggtaggcgagagccgagctggccagaccggcgagcataacaagtgaagaacgcatgtcgagttttgtgtggtgtattaatgaatgtatagggcaaaagcgattgggagtataacttctgaacacggattatacagaagcgaaagattggacaggcaggcaatagccgccaaaaacgatagactggaaagactggaaagagtggaaagagagaaagacagttgaacaattgaagatccaaagaggtgatcgccatggttgtttatatacccctgatcaactgtgagccgggaggcttccgggtgtcgattgggagtaccgcgttaggacagcctctactggctctaccccggtctccaagtccacatttggagctatcgaccccttagacttccgggatattggaggtagaaacttggaacctttcagggccaagtggagaacgacttctaaggctaacaaccggtgcaataggtgtattaccgcatggtggacttccatccggtttatttttgggttccagagcaaaagatatcacattggcacatccacaatctggatcttaactgctccattagggttattgagatagcttgagatagaagatgcccctctgtatccgtaatccgtacaaaatccaattcggacataaagaacgaaaaaagaaaaaagaaaacatgacaagaaaagaaatctgccaagtcataaaagggaaaagatcaccacgatcaaccgacggttgaaacgttcgatcacttttttttagcgattagaacccctttctcgtctgaactatatcgtactctgacatgtctacgatgtatattgtatagagttgtagaacactacgccttacagcttccaaatccaagtatctcaatctcaggaacctaagaagtatatgcggcattccgagtggcccgactctcctatgtcccaccgcgccggggaattagtcccggcacaatatgcacgctcttgaccacatcaggcaaagatggacacgtccaattctggtcaaccaagacctgtcaattcaagatttcaagattcaaggctattcacggcgtggcgggcaatctgtcagccaccaactcaaatatggtctaatctttgtgaggtattacaagaactatatattggccgtgaatggatttagttcatggataggatatggaagcatgttatatgtgttgggacagacccaacacaaaaacaagggatagcatctaggcccttccagtcttgttgcctacactagcaagacgccaccccgtcttgaaatgttactggaatatgaagttatgcagttcatggagaatctccacttttacagccaagacaaataagaataatctattaaagatagattaatattaattaatatcgagaacatgctcaaaacgagttgacctgcagtctgcagagtggagaaagaactatctgtgaaagcgcatacggagtaaattaaccctaagtacggagtatattatagtccctcgtacttgcattctaatactcgcgccaggacattcaacatgacagcgaaacaggggctgtcaatggctcgaggaataacctagccattgaacttctcttccatgctccacacattactccgtaagtagtgtagtgatctgcaggagcccaatatgtctcaccccacgcggacaagccccacgagcgccacaaacagcctctgagcaggaaggatgaccttcccctgcgcgttggaaattgcgctcagtctgatttccaagaggccggcgagatcagatgcagcattgcaagctgcagtccagctgcagctgtccggcctatgttgcactgtcacgatcagtccatgcaggagcctatcttcgctacgaatatcgcagtgaaaatggccgagctcaaatatccaaagtacgtgttgtcatccctgagtcaatagcccccctgatcctccatgcaataatcctagttttgccaacgcaactcttaataatatcggacatacgagtggtaaagacaacatccggtctagaacaaagaaaatgattccaaaatgtaaagttccccattcggtaaggttcaactagtccgacgcctttcttcttagttgtgttagtctttcgctcggaatgattggccgagaataatatcagaactatattccatagatacgacgagctatctattggctttttttactaaagttcagtctggttgtgatagttagttattgaaatcgcagaatgtgtaaaaccgccaaactaaagacttcgatctctcatatgttgcaccgataattccccaccccctcggagagtgtcggatgttttagttaccttacgatcaaccgaaagaaaaccccagcctagtgctcagtcccgcggtccagcaagatcaacctccttgaaacagttgctatttttgttttcgacgatcgcacggctaaccgatgatccaccagttgacagcaagatctcatgaaacacctcaaagttcaaagctataaacaatttcatgccttcatgcagcatcatgcagcattatccgaaattttgccgtgggtgggttgcgctgagccgaatgcaagacatcgtgaagccgatggcccccaattcccagcttgaaacaacgcccgatctggaaagtaggcacgcttttggaaaagaagtgcattggggaataaatctctcatactaatgactcggttgcaagttccccactgtctaggacacattgctggcagggtagatgactccaactatcactaatggcaacgtcctcgcgtaggactcggaaggattgctcggttgtgctgagatggaagaagcaggaaccgatctgttcctgcagttccggcccggtcttttcatgtgattgctgtatttatattccgatgcaatattactgccgaattggaaataatgtcaaatggttgacggaatgcaccgatgaagacaagacgcaacgttgcataccatgtcggtattacggtatacactacgaagactggttgttggaaatttggtgtctttttagagaatgttcccttccaatgttgtcgaaaaatttgttgatatatatttcgaggtgacactaaccttgtgaaaaagattatattatttaaatccaaaatcccaccattgtcttctatcattgcatggcaaaggaaagagtagcatcctaatcaagaaacccaagccgagttctcgatctgacctagcctacttcggatccaagtagcaaacggtccgaagaaatgtgtaccactattacccggccgttcacaaatcgccagaagagcccggtatcgttccaacgcagatgttgaagtggcacaaataaccttcgccagatcaaccggacagagataaggcggctgccttgcgtcttcgcagatagacgcagtgccttgcattgagcacgcgtagtacacgcaatggccaataccgaagcagtgacccagttcatggctcgctgtccgacaaacgcgacctaaccagagtgcggaaagtaatgaaggcgatgaatctatctctgggagggagcggtagaatgatactgcatccttcacaggtccggtaagctccgaaaacgaatttttttgtgatcctcggctattgaccggaggtcttttctgtctcttggcagttggttctgccgaagcacatgcagacatagatttctcacaatgagatgcaggccatgcatggagacgctcgacatcttgaatagaatctagtatcggattatatcttgcactggataccacggcaacgcgacttcccccgtacgcgcggccacatacgaactcgtcatcatcgtcctcgtagagatcgaaatccacaattatcaagagggcatatgcatcttttggtaaaatgctgatggcaacatcgagaagatcgtctagattgacttggcccctatataccccatttgacaaggtacgtgagcgaacccgcacgcactcatcgccggattttagacccaggtattgcaggcctgttttcttctgaggtttcttcttaggggttttccatggaataaacttcaaggtagatggtggcatcatcttgacaggaagaccgtgatagaacgcagtcagatagtcctggacatccttcgtactagggggttttatggactcatgatctggacattttggtgtttcccatgttcccacgaagtcaacatctgcatcaatttgaggagatggaacgacatagatcgttttttgcttttcggttaccggattgcggtcttcctcatcaagccattcttgaaagctctgcgggtcttctggatctccggcaagatcatctccaggcagcaacaaaggggcaggaaaggctctgtcgtcttcttcaagtaagagtttgtcttctcgtgggaagctttgatggtctgctttgatcgcagcgaggcgttgccgttggccttgtcgtctgaaacctgctacagcagcatgcggagaggaggacaaacagacacacgtgtgatcacactttgaaattgatctttgtggcatactggaaatttcaactcaagtgtgaagaatggaagaacttggaaggggacggcatgcgattgcgcacgagcccttcccggagtagtcatcaaggactcacatgagtcacatcatcttcatgtggaattatgatagagatggttgttcttgaatcacaggtcaaaggttactcaaccctgtttgcaggccttgaataaagcgctgaactatccggcgatcagtatcccagttctgagagcagttgcttgtgtgtctcatagctcaacttcaaacataagtgcaatgccaattccactacccaggacaatacctatgagtggctggaggccgatatatcttgcgacactgaaaggaatcacccgcagatcatcattcgtggattgaatcattggagtaaagtaccatgtcgaggtgatcccaagccataacatgacccataccattccaacggctctcttccaaagcgggacaatacctgatgattgctttacctcttgccagttctctggtgcttgtacccgtttccaaatattttgcacgccatcctcgagcatcatcccaaagacaaacgataagtagaatggcattgagccggatctttccatcggaacgctctgcagtatatcaaccatgacatggaacattgcggagataagaaagacaatgaaaatgttggtgtatcgctccagcattgaagatcgggtaagatgcaaaacatctcgcgcgatgaagttactgatagaagtgaagggctggcgcatgaattgatgccagaatttcctgtgaaatacgttaacataatcatgccatcctagtaaataaatatggcttacccccaaaagttgcgcaatgtaaatgcatcggccatactcccaaaggctggtggccagtctgcaggggaatctagcccgattccaacgaaaaatatcgacagtactcgatatgcaagatcaccgattagacggtttactataaaccaaatagacagatgcgtggctattcgctctgcccattgtccgaccggcacaatccatttgacctccaaggatgcgggctcatacagaccacgttccctagcctgctgaatcgagaccgtttgcacgatgtctagcactaggcactgccatgcgacgattgctagctgtcgcagcaaaaatcgaccccatgttgggacctgcataccccgccgcagataatactttggatgagagggcacattcttcacctgccagtgtgtattgacggcacgggtttgagtaagtaagcgagatgctgcgagcaacctagacccggactttcgagtgctctttgcgtcgcgcgagatgtctgaattgaccagaggattaagcaacaacaggtttgttgcctgcaaagttgcaatgacaaattgtgttatggcctggcaccatgttggactgccggacgagccaaaaggacggataaaacggctggcgatccatatcatccctggaatgcataggtagcgtaaaagagagcctttccgtgtggtgatgatgagcgcagcaggaaccacattctgaactaggtaggaacagaagaattctaatatgtttgcacctgttgagtgatatagcccgtacatcactgtctggtgtgagaggtgaatgaggtctcggtttaggctcacgattcgagccggacccacaatttatggaccagtcggttagatccgaatggattcctccaggggaagttctaaagggataaggagttggcttaccagatccaaaatttaaagccaacaggagaactttggaagctcagtgctgtattattcatacagcctagacttcacactgcaaaagtgtgctccgatgaataatctgccggcaattctattggttacctagttgtatacctatatcaagaaggcggtaaaggtctatatgcctacctagttaggacccggctgcctacaaacatctggttggtttatcagcgcctgcgcatctgtggaactttctctctacactcatctggacaacatgccttggtgtgcacaggtgtgtcagttctgtcagaagcgatatgccaacaaaaccgcgcttcgaaatcatttaaacaattacactggcacctagcgttttccggctgacggaatccatgacatcttggaaatcaatcaaactctttagcgccttcactcacactacgaggcaggtgacgatcacaaatacaaatgctggacatgttccaagataatcatatctcgctgccggttcattgagcatgttttttattggcgccactgtggatatcaacctggatcttcagaaacgaaaaatggccctcaacatctccattcatggtatcttccctttgatgaagagacggttcttcttcgcgaagagccatttccgttcctcgatcttcccctaggtacgttcacctgtttatcttttaccgctctgtccccttattcattcggcaagtaaccggttgtctcactgcgagcatgcatgttttcaaagaatttttttgactaactcgagcacattgattgactagagttgcgattgataatctacaaatttctcctctctttcgacgaaatatacattgaaaaacgtgtccgcgacagagatgttgacccccacagaagtgggacctggatgcaacataaccccatcaacaatccactggcaattatgtctgtaagtagtcaaatttatgatgaagcacgccggacgttttatagtctaaacacgttcacatttggatcgttctatggtctacctgtattcctgattggaatcggagctgaaaacgccatgctattgcggtcagtgcgctgcaagagcaaaacagatgaatacaaagactatgcggatgacattcgatcatgtctaacaaaggcagccgtggcgggacaaacgccaagccaagaactgcgaatccatcatttcgaagatctgtatttgaatcttgtaacccgaggacaacccccagttgatgtacctacttactggtccaatgattgtcgtctggtgcgacccgatattgcagacgcctgcgccttcccaggtcgaaagcgtttttccctcaacgtcattcttaggaaatatgaagtagacggacgaaatgccgatcgaaggtctacggtttcgtttgaactatatatacagaataagcgagcatgtgcttaggtattcagctgcagcggcgctgtgctttggttcctcctcatcataatgactggaagcatgggatgtgttctgtaattcagacaagcaaaagttactgatagagaatgaatgtagaatgttcatgacgtctttgagccatctttagcacgcatagcatagtattggccctggggatgatttgcgcgttgaagaataactatattgagtcttaattctgggctttacttgactagtcctatttgaatttgagattactgttggcaccactgtgaacatggaggtagtcactagcaatgtctcagaactagtcttgggaggccaaaaataccgtgaaatactgaaaaatacagacaggcgtaaaatattcagccaatgagataacagctcaggtaaggggaccctgaaaagtggaccagcatgtgattggctaatgaaagtacagtactttcagctcttcgctcttattttcctttccaaatgtcaaacatctcgagattcaatgatgcaaacagataggcctcatgtcgtgttggaatacgattgtttagatgatccccagatccccgaggatcagccgcttctcgggtccccattcacccactccgaaacccactctcaacatggattgaccatcataacttgcactgcctcggtattgtttattgccagtgcaataaacaacctcgtcgccctcaatatcacacaacactcatccgagttcggattagaccccggagttgaattatggtgagagacatctcaatgccccggcagttttctatctggttacacagaacatgccaagctcacaaccccacaggccaatgtcaatgcactatcttgctcaaggttgcacattcctgctggcaggatctttagcagacgttctaggcagtaggagaacattcctgtgcggatgctttttacagactgtttgccatatggctagcgggcttgctcgaactggcatgcagtttattactgtcagatttgtgtccggcgtggcttacccgatgtgtttcgtttctgcaatgagcattcacagggagaatcttccagttggtaagatgcgcaatttggcattctcctgtaccagtgcaagtcaatatattggctccggggtaggcatcgtccttagtggaatactctcagagactgttggttggcgatggggctttcattgcgctgcaattttgagcctatttgggtttctcctatcattttgcaggattccccaacaggccgaagagccaaaatacgtcccatgggcagacttggctgaaggtatcgattggtctggaactctgctggctagttcattgatggtacttctattctctgcattggcgtacgtattccctctcagtgatagtctatgcttacagaacgctaattaataactagcgtcatcacaaacaatgtgcaaaacattggcagatcgggcctcttcattcctcttgctcttggttggattcttgtggttgccttcctgttctggcaggattgctgggaaagagacagcacacaacacattcagaattctctttggacaaattgccattttctttccattggtttggttattttcttcgtctacgcgtcttctctctctacttcgcagcttatgatcttcgtattccaacgagtacaagggctctcggttcgacaatcttctttccaatatctggcaattccaatcgccgccgcgctgagcagtctggtcactggacgtttcttgactcgtgttacagccaaccagatactcgtcattgcaatatcactttctagtttctctccactcttgatggctacattgagcacagcttggccttgctggaaatatgcaatgcctgccctatcattaaacccggtggcaccaaattccgttatcccaattgccacaatgctggtcgctgggtcttttccctcagagactcaggagtttgcaatgggggtgctctgtactgtggcaatgatcggagcctccgtaggcatggcactgacggcgcttatctcaaacgatgtcagcacacagcagctccagaaacccgaccagagtacttctttagaatccccagagatatggatgagcggttatcggactgcattcttgttcttgctctctctaaacttggtcggcttggccgtcacttttggctgcttgcgaaaacttggattcttaggtcggaaattggatatagaccattaattcgttcatttcttcttacttatctgaggtccatgttcccattagtactacaggaataagtattctcgttaaggatgcctaatggtacgcaagctacttgtctaaattgtctaaacctaagccatttatgagacaatcgactactaccttccctattgaaccaacatgaaagaacttaggccattagtacccctttttgtcccttaaatcatccttgagtaaccatacatcggctagtattcatagaatgcgacaatgcaatcttataatagtgggaggcatgttcctataaaataaaatccatggccaccaacaaacttttcgatttcgacccgggcaaaaaagaagaacaccatgtcaccaccaaaacagagcatcctcttcctcacaagccccgagcatggacagtccaacgtagcactcgcagtagccgaagagttcctgcaccgcggcgagttcgaagtccacatcgcctccttcgaagaattatcagcacgcgtgcaagcgataaacgacaaagtggagtacgaccaagtcatccacttccatccaatcgcaggtccgtccctgtccgagatcgtgacccgtacaacaccgaatatatgtcatcggccggggcttgctggaacgcgtgatgcgtgtaacatcatcaacatctccgtggtaggctggaagcctgatgagtatatacggtcatatcgaagcagtctcgagattctgaaagatgtccgtccggtcgtcgtggttgtggatccgctgttgcatctaggactagatgccgctcgcagtatcgacacgcgaatcgtgatcctttggcctgtgcctttgaaagatatagtggtaactatccagccgaaagctggtcttttgtggaaatatcccctgtgcgcaactcatatcttcctcttagaattctggtatcgagctgactttctgctcctcagcaccgggtcgggatatccataccctctaccatggagattgatccttgcgaatatatacatggcgttttgcttcgggcttatggttcgcttgggtaagcccctacgcgatcttctggacattcgaaagaaagcaggaattcagactgtctttcctcacgtggcaccttactgtgaaaaccatctacatctctcgccttcattccaagagatggatttcccgctatacgtcccggataatgtcatcagctgcggtccaatcctccggccatgtccgtcacttacagatagcgatccagcacgttgaaagagccgacaattctgatatgtctcgggtcacatgttcaagctccggaaaatgatgcactgcagatgacgatggctacccaggcggttttgcgcgaatttcctagtatgcaggtcttgtggaagctcaaatatgactgggaaagctctccgacggtcaagaatattctcggatctcttgtcagttctgataaggtgaggattttcccatggatccagccggagattatatctcttttggagggaggtaatatacttgcatatgtccaccatggaggagcgaactcatttttcgaggcgtgcaagtaggttatacttggggtcacacatattgaaagaaaagtgctgatgtctcttcccagggctggtgttccgcaggtcattctgccccagtggttcgacacatacgattgtccggcccgagtagagtggctaggtattggcttacacggaagccgcaatgtggcaccgggtatagacggatcgaagctgtcttcggccctgctgcgagtgttgaaagataaaggaatccagaggcgggctatagccattggagatttgtgcaagacggccgaaggacgcgtagttgctcatgatcagatcgtacagtacgcacagaaagagttgtgagcgacgtaggtgcaataaattcattgagtcattcacagttccccttccgagggctcggggcatgtatgcattatgagaatgtcattggtaaagacaagtcatcggcaattcagagagataatagccgaccgaaatccatgcaatcggtcatataaatcatgaaagaaaaaacagcaactgcgatcctcaacgcccgcgcccatatccaacaaaaataatcctagtaactgtgactagatagtcgacagctccgtcagaactcgccggacatcttgccgagcttgcctcagcccctcatcaacagttccattggcatgtcttgccttcacctcatagtgtagctcaaccagctcctttgcacgacgaagatcggccttgtcgtctgccgggctctgatctgccaatgcgctaccggacttggttgaacccgaggctgtgccatttttgtgcacatctaccagtgccagggcctcgttatgaccctgtgccgggttgttagcattgtcattgtctggtggagtactgtcccttgtttaagacgtggcttggacgcgtttgggcagccgtgaagaaggaagcaatatacttacgcagacgcggagagaattgatatctgagaggatctctgcgacttgcattttgatgtgtctagtgatgtttgagccgagagagatatttggtgtccttggaaatcagagccgaagagtgcaatgtcttggcatacccgcacttattcgaagtccgtttttcacctgggaggagattaatatcggcactcggggctcgctggatttatatatattattaatttcgtctgtctcaaagcttggcgctggatttattatcggtaggagaaataccgactctttggactccccaaatgatgacttcttatatacttctagtctctataagttaatctaagtctccttgaactcatacggtccctcgcggtccttaacctcaacctcaatccgtccctcctcgatctccttcccgtcaacctcaatcgacgccttcataacatcacccgccttgacctgtccaacacccttgggcgtaccggtaagaacaatatcacccttctccagagtcatcacgcgcgagatatgcgccaactgctgaggaatgcggtgcagcatcaggctagtcgagtcagcttggcgctcggcgttgttaacgctcagacgcaggaatgcgctgtgcgggttagggatgcgcgatttggggatctcctgcgagatagggcagaaggtatcgaagcccttggcaatggaccagggaaggcccttcttctttgcctcatcttggacgttgcgggctgtcatgtcaatagcgaggacgtagcctgtttagcgcaatggtttgattagcgacttgctgcttgagccggtccaccggtccaccgctggggtggacactgcggtatgcccgttcggacccggattgaatgctgtactcactctgaatcgcatccaatgcgccctgctcatcgttgggatcgagatcgcgcacggtcttaccgatcacaagaccgagttcgacctcatagtgtaggctgacgcccttggggcggagaacgggacccgcgccgggaacgaggatggatgatgcgggcttcaggaagaagaatggctgcttgggtgcggtgttattgagctcggcaatgtgatcgctatcaatccatgctgttagcaattgtggccgagagaagagaaagcgacgccggtgtcggaactcccgagggaacagggcgcgcggagacagggaaactcacgcatagttacggccgatgcacataaccttgcggcagttggcgcggacggaagccattttggagggaattggggttatgcgattgacgaagaagaggatttaaggaaagatatgtcgtgggagggccggaggttcgggtgttctccgaaagatgcggagaactcccacggcgccgaccgcttgtatctttatccactctctagagaaacgctgaacgaggaaaaaagattggaagatacgcatctacatatctgacactagagaactcaatgatagtcttttacggcactattcattcaattgcagctggttatccgagaattgacatatcacacaaccacgaggtcggctccctcgtccgagaatcggaatatgatccgagcatcttaatatccgtaggaagacaaatatattgatagagcaagagtcagtcaagacactggaactgctcgaaaaacctaggaataaacgtatcacacgataatagaggcctaccggctgttgaatgggctcgaattacgcttgtatgccactggcaagagtagaataatacaagctgtttatacactagttattgatacagtaagaagttaaggcttacaccaggatatctattcaataagagaatacgaagttaaatatcattcaaggacaacgccttgaggaacatgtcacattttggcccgttctattgatcaagtacgagaagaggaagcatccttaaccaacgagagcgagctagatacagacaaggaaaagcagagggaaatgcataagaaataagggaaaacggagaagcaagaggtgaacgcaaacgtgtctcatctccgttagtgcaagacataggaaccatagcaaaggccgagaaaaatgccggggcgtcgacttgtcaactcaatatgcggaagcatagccccagtcacttgcccggcacactgcaggcggaaacgcagaaagccacttttaacgcagattctgcgatcataaaccgcatcaagacgtcaagagttagggggtttagatgaggtcagccacgttcatgggcatctcctcaacctgggtggagtagaactgctcgatctcacggagcatgcggacatcgtcagcggtgacgaagttaatggcaacacccttacgaccgaaacgaccaccacgaccgatacggtgaatgtagttctcacggttggcggggagatcgtagttgatgaccagggaaacctgctggacatcgataccacgggccaacagatcggtggcgatcaggacacgggaggaaccggaacggaactccttcatgataacatcacgctggccctgctccatgtcaccgtgcatagcggagacggtgaaatcgcgggcagtgagtttgtcggtgagccagtcgacctttcggcgggtgttgcagaagatgacagcttgggtaatagtgacggtctcgtagagatcggagagggtgtcgagcttccactcctccttctcaacagcgatgtagaactgcttaataccctcaagggtaagttcctgcttcttgacaaggatacggacggggtcacgcatgaacttggtggtgacctcaaggacatcctggggcatggtagcggagagcagggtgacctgggtagactgaggaagcagctggaagatgtcgtaaatctgctcggtgaaaccacgctgaaaaaaagagttagaaccgattgatacatagagtatcaacaatagcaacttaccgacagcatctcatcggcctcgtcgaggatgaagagcttcatggcggtggtggacaggacacggcgctggatcatgtcgtggacacggccgggagtaccgacaacgacctggggaccggcgcggagagcgttcatatcctcacggacgttggtaccaccgatacaggcgtggcagtcaagggacatgaagtcaccgatggcgacaacgaccttctggatctgctgagccaactcacgggtgggagcgaggatcagagcctggcaggccttgatctcggggtcgatcttctgcaaagcggaaatggagaaggtagcggtcttaccggtaccggactgagcctgggcgataacatcgttgcctgacctcacaggttaggcgcaaatttcaaaaatgaatctggaataaaagaaactcacccttgatgatgggcatgatagcacgctgctggatggcggaagggcgctcgaaaccgtaggcgtagacacctgatatcccgtcagtatttttttttcaccccacctgataagacgaaaagggacttaccgcgaagcagctcgggcttcaggtccatagcatcgaaggaatcagtgacctcatcgtagttagactcgatctgccctattgatgaaaattgcaagattagcctccatcttcatcacgcatttcagtatccgacgccacccaatactgaatgcgatcgcgcgtgcgacagcgacagcaagcagcggggtctctaatcagaaagtaacagagacttagcacataccctcggcaagatcctcaagacccttgtcagccatgattgcggtttgatagaaaggatcacaggcgttgactgtgatcggtgtggtggggtagttttagcgaacttgtgtagattcgcgtgggaaagttgacttctagtacctcagactcttgataaagagtctttttacaggatactagggaatattgaaaaatgtggttggatgtgaaaattcacaaatggggtgggaggaggaagagaagaaaagcgaaaaaatcgaatggccacaaccgccgcgccatttgctacgccgtttttttttttacggggcaaaatctcaccgcttgccgtgttgggggtggccaagcccaagcgagtttagagtgggcgacatgggcatgaaaacatcttcttagtgatgatattgcattttttgaactgattggtgtggtgcaggttgttgctttgtttagggactttgattctgtccattcagtttcttatgttcccatttatttggtgaactatcttccagttgccatcaaacgcgtctttgaagccctaaagtgccagccagatcatgcctgatatcacctccttgtcgagtcatccaccaccacacgatgcagagatcataacggaggctatcccctcccacccattaggcgtgaagccaagtggaaatgctctgttggctacatggagtcttcgcaatgccatagggacctttcagcacctaccagacgaactaatcctgttgttgttggagactctcgatgggccaagcctattgagcatcgggcggacatgcaaggctttctatgcatttacccgggctgaagaactatggaaagcgctgtttgttcggtaagctacctgcatatccagttgaaccatgtagatcttagagccctacatttattcaatatcataatgtcccaaacttccaatgaacacatgagatactaagtctgcttgcagtgacccaagagaagatttcacctggcgagggacatggcgatcaacatatctcaatatccccgcctccaaggtgcccatggtggactgctcccagttattctccgactctctataccgaccgttcaactgcgcacatatctcactcgacccatatgtctccaagattccggcgcggaaccagatcgcacgacttccagacctgtcacctgaggaattccaagcaaagtggaccgaccgaccattcatcttgactgagcctgtcaaggcctggccagcatacaagaactggaccgtcgggtcattactcgcccgatatgggaagaccaagttccgcgccgaagccgtggactgggccatgcgtacttacggcgactacatggcagataactccgacgagagcccgctgtacctatttgatcggtccttcgtctctaagatgggactgtcggtcgggtctccagaaaccacacccgacgcatcgtactggccaccagcgtgcttcgctgaagacttcttctccgtgctcggtgacgaccgccctgatcatcaatggttgattatcggccccgagcggtccggcagcaagtttcataaagaccccaatgccaccagcgcttggaacgccgtgatacgcggtcccaagtattggattatgttcccgtccagcacgaaacagcctccgcctccgggtgtctttgtgtcggatgaccagagcgaggtgacttctccgctgagcattgccgaatggctactgggattccatgccgaggcacgccggactcagggctgcgtggaaggtatctgcggcgcgggtgagatcctacacgttccgtctggatggtggcatttggtcgtgaacctagagccatcgatcgctattacgcagaactttgttccccgaggccatctcggcgctgctttagatttcttgtctaacaagccggaccaggtgtctggattccggaagaatgtggttaatccgtgtgagcggtttatggccggtatgcgcgaggcatatcccgacctgctggagcacacttgggatgagttgcagaagaagaacgaaggcaagaagcgcaaatgggaggatattgttcacggaaaaacagaagacacccaagacaccgaaggaggtggatttagttttggatttggcgatgatgggagtgatgttgaagtcccatgaactattactgcaatatggagagtgattgaaccgcaacccaatgaagtcgccaccacaaaccagcaccattctccgccggaaagggcttccaaacccatcaattccaatccaaaaccagttcaaaatttgccatatggtcattgttctctacactgcctctgagtctgcatattcgtcaatgccccgggcatcctttaatgacacgcgattgtctttgccgctggcgttccttcggagaaagtcaagtacccaacgaatgcgcccactgcaaccgcaatcataaccggcccattatacgtcatgaagagcaacctaaaccaaatcagcaagccaggacggggccaaatggtttccgggaggcactcacatgatgaagaagctatagaacacttggatggcatacaaagccgccatgataagcttgcccttgcgcgccaatgccgctctgttctcgcttcctacaagcagtggtgagctttcgtggtgagtgtggttggttgcatccgccaggccgttggcaatgatagggtcggcgatctcagcgtctgcagagagccaagacatcaataagaagcgtgctcattcagagtataccatctccctatcatgtccccgatatccaacgaaaacatagtaggaattattgggaatagagtatccttgacactgtccatggaaagagcaaatcacttacccccagtagtggcagaagttcccaggaacgcacttagccgctgtgcatgggcagcctcgtatttacgagttgctgatcgtattccctcgtagcccgcagcaaggataacgatagcgatgagggacaagaggaaggagaagggaccggtgatacgccagctgcggaagacaatgcacaaattctcggaggaccagttaaatagcatctacatacggaattagcataaggtaaactacgaccaaagctgaatcgaggctataactcacattcatactgcatttcccgcccatgtccatatcgccgtggcccatatcgccatgacccatatcaccatggcccatgtccgagtggtccatcttcaatagtagtgagtagatatgcaatagtaacaagagacctcttatgtctcaaataagataaacgacaatatactcgtacgatggcaggtggtacgaggagcgaacaaagcacatcatcggacgattaagaggaggggaatgcaaacaagacaaacatcgataagctctccaagcggatataactctccagaacccaaacgcggtcattgactacgcactgacactacatccaccccaatctcaactttgtttcacccattctgcgcatgggatacgtcactttagcataaaatattcttcccattgcgatccacttccacaataatggccgacacagcaccggctccaacagccgcgaccgcgaccaccggagttgcagcgcccacagccggcgcaacagcaggagcaccgaatgcgcccgcagatcagaatgccgcgagtcgcgggctaccttactacgagaaactgcgccgcgagctgcgggacacgctgcagaaaaagcgcttaatggataagagcatggtgagttgcagccttgcgcgttcccgtctccagggaccgggacgtggttacctctctggaattttgttatttcgctgcgcgagcatgttttccaattgagaatctgcaatatcgccctataaatgtgtaaaccgttctgctctgatgtgtttctaacacacctttcccccaggcccaactcgaagaccaaatcttccgcttcgaacagtcatacctggaagaaacgaccgctggaaacatcatcaagggctttgacaactatatcaaaggctctgcgaatgggtcgagtctcggcgccgcgggactgggtctgggcagcagtatgggcgggtcgaggcgaaaggcgcaggtgacggaatcggatcgagttttctcgcgcagctcggcgagttacatgatggtatgctgaaccgacccgaaatggaactaccatatggtgtttctgatttgaactgaggactaacgattattgttgtgtctgcaggattccccaggtccctcctctgtacaaaccacgccttcccacgcagcaacgccgacatctacgactggaaacggcatgtccatgaagattgacccgctaaccgtttctgccgggatgaggaactcgaacggcgcatcaaaaaacaaaaagaaggcgactggtgggtcgaagaatacgaagggcaagaaccagaccgaggatatttccgacgaggacaagccttctgtgaagcggttgaagatcagctacggcagagactgagttttcttgcgagattcagtcttctttatgttctgcgcccgtcttgcatctatctgcttggctttttcttgagttcggagttggttggtttgtcttttcacatgactcctgggaggagtcgtgtttcgggcgtagcgggaaatgggaatgggatttatccgtcttattacacctacgatgcgatatcatgtaaatcacgaagttatacagactacagcgtttgtcggatacatcatttgtttcattgcttcaaattgaatgcgacacgagctaggtacatgcgatgagtgccttgcgatactctttgggcttggctaaagcctgccaatcaaatacgtttcttacaatcacagctgcagtcggtatgtagcgacctcaaacgccctcaactcaatcttgatcgcggaaagaccgcctgcagattcaatatcaagcccgtggttctcatcatcctcgagaatattgcacttgaaaacattcttcacgggcagtgaggtctcaatggtaccgcgagccttaccaccaagcgattcatagacacgcagaataacactctttccaggacgggtaggaacaccatcccaggaaacgtcaacatcatcctcgccgcgcttgacaacatctagaatcaaggatggcgcgcccttgatagatagagatttaaacaaagcattggaagcagatgctttagggccggctttctcaacaatgagtgggttattgaaattgaagcctgcgcggattgttcgggcatcaagggcaccggcgtggggaagaattgcgtagcgaatgtggtggcgacccatgtcggcgtgggcatctggcgccttgggggcacggagaagcgataagcgcatcaggttaccgcatgttgcgaagccgtatttagagtcgtttaggatggagactccgtagccgttttcggagaggtcggcccatttgtgacagcagacttcgaatttggccatatcccaactgcatattacttagtatcgttgtgaaggagatgggaagtcggtgcataccttgtgttataatgcgtcgggcgcctaacgatgccatactgggtctcgtaggatgcttcggtgttgacgatatcaactgggaactcaaccttcaggaacttcatcgtctcttgccattccacctcgctctccatttccacgtatgagggctcatcggatgtggatgccgacaggctgatcgtggtcttgatccagctcttctcgctgatctgtgtctcagtcatgacactcactcggtgtgggtcattttctacaatggtcgtcttacccccgggcaactcctttcgtgactcaatatggaacacctcgacatcccatgcttgccagtaaagaggcttgtcgtcgaagataacaagttggccagccttgcggtcctttgcgacgatttctctatcggcttgcacatcgtacaaggatgtgataaccccgtcatggacatcaaccctaagtttaccgttctccaggcggaagacaccagatttgatctcagtaacggtcaccgaagtggttgttttgaagtcagcccgctgaacttgcatcaccccagttgtaccagcagccacagcatatctggatccattatatgcggacactgctggaggaattgcgaccacttctgatcgggcccatggcaaggtattgagggccatgaaatttccacccgtgacatcgctagtgagtcccaaagccttgagggcattctttcgcagcttagctccaatctcaaagatttcggcatacaacttgtctgagtcatcatagcacatttcgatggagctacccggcaagcaatcatggaattggcaaaggagggttccttcccacatctcatcaatctcctttttgggataccgatatccatcattagaagccttgatggtagcgaatgtcgcgagaagctcaatctcacgcagcaaaaactcggccttgcggttattgcgcttattgttcgcttgagtggtgtatgttccacggtgcaactcaaagtaaagctcgccgtaccaggtagcaaaatcagtgccagaggcagcctttgtctccaactttgcaaagaaatcatctaccgactcgcccattttcactcggggcaatgagccgacctgatcactgagaccgcggcatcgacgcagcttttcgaggtgcccaaaagtcggaccaccacctccgtcgccttttccgaatacaagcagcgatgacttgtccgtgtctagagacttatgctgagtgacactgcgtttgacatcaccgaaatgcgcttcagctgtgtaggtctcagcaggagccatgtggcacaagacttgactgccatcaagcgcaacccactggaatgtagtgtgggggaagttattgatgttgttccagctgagcttctgggtgaagaaacggctcatcccagccaggcggcatatctgagggatctgtgtagagtacccgaacgtatctggcaaccagaaagttgtgcatcgcttaccgaagtttgcctcgaagaatcgctgtccatacaagaactgtctgaccagcgactctccacttggcatatttgtatcgtgctcgacccagctcccaccgatgggctggaagttgcccttccttacccagcgcttcacacgatcaaaaacggatgggtagtactgcttgagccatttgaattgttgagcctgagaacaagcaaaacggtgctcaggatatcgttccatcagatcacattggttagaccatgaccgtgctacctttcgcttggtctcagcccaaggccacagccagcaagtatcaatatgacaatggccaatggcataaactatcggctgcgtgtctgtgtcgtaaacatcggatgagtctactttgtcgccaaggtactttctagcaatcttccgcccctcgttgatagaatcattgcttccgttgcccgcaatgaaagtatcgatgatagaattggccacaacattggcttcatgcgactcccatgaatcccctgggaattcccgggcggcgtcaccaataatccagaaatcatagaaaagcgcccgggcagccaggtttaccgcggtgattcgcgcagtgctgagcgtgaactgcttatcgggatttggtggctggatcgaatcgccaccaggagcattgccgaacatgccattgcaagccatttcaatgtagaaggtatgctctttcccatcgcaccattgtttggggagaacaaactcggtccgttctccgcctccagtcaagccctgcagcgggtgtccgtcctctgtccagatcaggccttcgttgttggcatcccagtggaactctagatgctcccgttggagcatgtcctcgggcactgtgaggtgaatccggaaccaatgtgtggaccaactggggccaaaggaggcgcctatgcgagtgggcttgaattcctgagaggtcgcctctttgaaggtcggtcgctgcaggtccggaaccgagtaaacagagagcttgacatgatcttcgtccgagtttgtggcttcgtggtactttgagacgaggttttggccttcgtactggccgttcgacgtgaactgattcaatctatcggtatagatcttcttgatacgttggccgaccggacgttcagctaactggggtaaagctggaggagcggggcgagagggaacttccccacccatgatgacggattttgattgttataaagaagaaaaagaagtacgtatgctgtaatatgattgaacgaagacctaagttgtttataacagagagggtgagaggtgaaggaaggagattccctcgagttcccaaatgcggagacatgacggcatgcggagacggcgatccacggatgttacggtataccctcaacttttgtacctggatatagtcatggatatattaaagagtatttgatcattattcagatcatttcaacatctattacccaatatacttagcgtacttcgtaaactccccatctacctttaaccgttcccaatcttcgtctctcagacagataccaacaggcatctcaccaccggccgatcgaggcatcaagtatcccaagccctcaaagggggtaaaatgtggtcttcgcacagcttcaggcttacccaatcctagattgaagtcgagatcgtaacagctaattctcgaccacgaactaagcataacatccgaggaaacattgaccgtggaagtaagagaggccttggtcttgtcaaccgagcgactgagaactgtagcgagggcacgggtattgaaaataagatcatttttcttagaatcgagctgggaacgaagctcggcggcaacgatgcctagaggcttttcgaggagtttttggacagtatcggtgttgtatgttaaattctgcaggagacctggatagtcctggggaataccaaagcgctgtctcatgtcgacagcacgcgtaagcatcgattcagaagtcgcttccagacgagaagcccgggcgcgggcaatggatttccagataaaagcgttaacagcatcgtcagtagagataaagtccgtggaggcgggcaatgtattggtagcgagagccttgagggagccaagctgggccgcagagaattcaatataggcccatgtagattttggaggtgtaataggattcgagacgacagtttcgacgcttggcgggggtttcacaatctggcgagcaagctcagggcccggggtgtacgaatcatccagtaatggaatgacatgactccgatccatgttaccgactgcaagctcctcgcttgtgaacggctcatggtggcaagccttggacagcaatccgatgatagagtcttggccagtcatgtccatgacattatgctgagcgaccagcgtgagcatcaaaccgccctcgattaaattcgcctggacacagaagaccaatgctgactccgtcgtgatatttggcaaattgcccggtaggtccaaagttgtacaaggagcgatgactttctcgtcgagcatggtaaaagggaacttggcctggcgaagcccgtccattgtcggcgcggaggggtcatgtcttagatctttcaccacgagctggattttgtcgagaggagttattttgaagacgcccgtattaccatcccctgcgccctcgttgacaacctggccagtaagccatgggaaactttttgccaatcggtcaagtccgtttgtgagagtatcgatgatggcatcatgagaagatgcctcggggacggggtaaatgaaacatatttgtgtgtacaatttgtagaggcttggagtttggcctaatatatcgagaacgttgtccgtcattgttactagttttgtgcaacgtctcttgtttttactcttctgttcctgtcgaggggagatataaacattgccccgccaagtccccatcctttgtgagtcaacattactcactacgaatcattcagaattaatgtatttgatcagttcctaggataatatgtttaaagacatacttatgtattctctattgatctatctcaccacagaactcgcatcggggccacatataggcagacgctcgaggcatatattttccaacgccgtctccatccaatgtgcgacgagtttgaactggtcaaggtgtatttgagctcaagaagtgttcagaattatacatgccgaattctctaggacatatttctgaacccgtcaatgtcggccggttcgctgttcctgagagttcgttgatagatgatgcgtctttcgtgcccgatgccaacgttgagatacaggctgcctttgctatgagactgtgaaggttccttttataatctccagcggcaattagatgggatataatatattcagaagagatttatatatcgatatatctactgtataggttgacaccagaatgctcaaaataaatatggcaacataatctaattaagtatatattcatgcaccctcaaaataagtagacatatctacgacagtaagtcaccgattacctttagattccaccatgtgaacacacgcgcagattatcgcttccacggttatgggaagatgaagccctagaagaaccaggatcttcgtaaaaagcctcatagttgatcggttgcacaaaagggatttcgcacattttcttttgactgtccccatgctcgaaatcgaacaattctcttggaatttgggagtgggacgccgaccctgatcccgatcgctgcccaatggcattgtcagacttggaagctgatcgatctcccgagttggtgtgacccgagatggattgttcaaagaaatccgagactacaccggccatcatgcctgtctgaagctcggcgagaacccgtttgagggttgggaggcatgtgcagagaatggaagagctgaggattaattgtagccagatggctggcatgagggcattccatgtttcatctagatggttggagttatatagtggtcggagggagtgtaggccggcaatggtcagggctagaactctatgtgggattagatgaggattttattgatgtttggaggttcacttacaggatccgcagcgcaaaaagggcagagatttggtggcgcttccaccgtattatctgcacttgatgtagtaaaaccactggtagtacaattattaccacgtctaataacatgtgggtgcctcctagcgcgatatataaaacttcttgattcacgcatcgctcggggctggagttccacggttgtagttgcttgcactgtcttccgagcgctatgagtgctgccagagcccaggtactgatcagacctaaagcaaccctacttgcaagcgttattttctcaaagggttgcaaggataggatgaggagcgcaacagctgccttggaacatcctaagacgacaatagcgagaagttgactagcgaagaatgtcttgattatgttagagcatagcctgttagaggtttcttagccttcttaccttgctatatttttcaaacgaggcattgctcaatacatatcgatgcttgccaatgccatgcgagctggctacattcacacacacagtctgagggataaatatgatctgatgaattaattagactagacaatgattaaacgcaaagctacttacacaactgagaaatagagttgaatcgctccaggaaactctgcgcaaaacacgaatgcgagatatcaccgtcactgttgtcgcgaggatagtgataataagtaggatagtgctcacggtgataacccaagcactatgatcgttatcggtgacaggcaagagtggcagtaggagaacatttatgttggatgacatggcagtcgaaagattctgtagacataaatgaacagaatcatgttcatggcatagcagaagagacattatatgatatagaacccagccactgaccgagtaccctcatattgggttgttcattggacctcctataacaccaaagacacacaagcacgataattcaagtcttgcaactgatcagtctatctcaagttccacaaccgtgcatcttccagtcccacctccaacgccgatacccctaggcaagacaagaacaatttaccgtaagacaacgattctgtatgatccttgttcttggattcatgacctccgtgccagttttgctttttctttccccagtcttccttgggaactgtctaatgtttttgtttttcgccatcaactgccttatttactctgccgagaataaatggagcgccttgagatgctctccttggaaaggggaaatatagtcattggaaaagccgcgccagatcaagatgcaaatgtctccaatgcctatgacaccccgcgtaaaaagactggacccccggagcaggcttcgcctaaggtacgatacgatttgttaagtcaataaagtctgccagctgagacagtatacagcgtctttttaatttcacccagatattcttcttctcacttacttacttgtcgagctgggaaactcaggctttgtacggaagtcttatcccttgttgtgcttcagtactaataacaccgccacgacttaggaatctgagcacagtgctctcaaatggcggacctgaagccctagcttggggtatagtaattgtggtattcggcgcaatggctcaatcagcctcgctagccgagatggcatcgatgcaaccaattgccggggctcagtatcactggacacattacttggcaccgacaagccagaagaagttcatcacttggatgcagggtgtgtcacttatcgagtactgcctgactcaatgctaacttcatataggttgggtgacgtggtttgcgtggatctccacactcgccggtgttgccaacaccactgctacgatgatccagggcctagcaagtgtgaactaccccgagtacgaaccaaagcaatggcacataaccctcatcattattggcatgcttattgtcgaagcgttgatgaacatgtatacattttggctgattccgtggatcgagatgctggccggtattctgcacatttgccttttgatcgtgtttctggttgtattcacggctctagcacctcgtcacacgccggagtttgtctttctacacacgcaaagcgcctcgggctgggcgactttccccgcatggaatataggtctgcttactcctgtctgggggtttgttggtgcgtacacactgaatacttggagcaggtaaagactgaaagctaaccatcgcaggatttgacggcgcagtacatatgagtgaagaagtccgtcgagcaaaacaagccgttcctaggtctatcttctataccgtcgttgccaacggtatcctggcatatgcaatggttgtctgcatgctcttcacgatgggctctgtggaggaagcccagaaatcaagctttccgataatcgagatctgccggcaagcaacggggtcggtgaaagcagccactgcgatggtcagcgggctactcgtaatctcgctgtcggtaaatctggcgagtatcgcgtctgtctcgcgattgacgtgggcgtgggctcgtgatggggccctgccgcagtggtttagctatgtatgtatctcgcaccagacggtgccacggaagacgacgcagaatatataagctgacaagaacggcagatcgaccgcaagcacaacgtgccaattcgcgctgtttggctcccagtaatcgtcgtcatgatcctcgcgtgtttgaacatcgctgacggtgccgcttttggggcgttcgttgcactggggtcgattggcctcttcgtgtcatattttattgctattagtttcatggtgcataatcggtttcagaagcatgtggcaccgcttgggaactggaatatgggcatctggggacttccagttaatgtctttgctttggcgtatactgcctgggttacagtgtggctagcatttccgtcagcgttgccggttactggtgagaacatgaattatgcggcacccatttttggtatcactaccttgttcgcttttgtatattggtttatcaagggtcggactcgctgggagggattgaataaggaggttattcgactggctgtggaggggggagaacttcagttgaaatgattattctttgtcacttgctactggctttctactagatgtgtcagggtatatagtatagcagaacagctaaagattctattcatctaaaataatccaagcaattacttattcacaccaaaaaccaaatccatatcgatctccacaaatccttgatgaatctcattcaaacgcgtctcagcaactactctagcagttgcaagtacaacagtactaggggcatcatatggtccatagactggcatcgagatgcaccgcggagtgaggcgatggagaggcctaaggctgacctccgcgtgcccattcttgattcgacagatcatacttttcatcagcctttcgctggaatacttcctatatctctcgtcgaaatgcactgtcacgaagtagacgcattcatagtcgctcatctcatactcggggagacccggtcctccaaatttatacctaaacatacctggttgcatcatattgagggttttcggaatctgctggctgttgggttagttattaaattgctgaataaaatggctgattatgaacaggtacaggggcttatacttgtttatatagaagaatggagacagccatgatatcatattctttcatttcggacctctagtaagagacattgacctttcattcaaacactaaatagctttgttgaattatccgatacattccagatttactatgcattgttgctctttgtcttgctttgtatctaattaatccctaggattaagccacatgtgccaatctgataaggaatctcaattggcagatggggagttttgaaatactagcatcattagttagttactaggtttatctatccatttataattaagccagccaatgaggcattttgtaatctacgcatactctacaaaggtcaagaaaagtggaaagtccaaaattgttaattgaagtcgctggcgtcatccgtcgtaaatagaccgtgggcaggtgccagcatcacccacggtcatgttttgcagagcaagctcatgctaaggcaccgccttaaagagtgaaaaaaatgacaaaagtagatcacaaagtagatccaaaagctcatgggaatccgtgggaatcagtaaaggagaagtatatatccaaaagtatatcagaggctggaacttaagccttaacacaatactgatatccgagccacagatcagaacagttctcgtcgaggccagtgttaatgctgcggagttcctcgaaggagattccgtatgcatcggtcaattttgcgcagaagtcaccttccgtgatggtgtagtacttctggcatgacgaggtggcgtatgggtagataggggctgttgaggatgatgagctagtggctgctgctgaagatgtcgcggctggcgcggacttggttgtccaggatggggtggcggtggcggtctgcgtggcgacacgcacgttcactgtggaggcccaggtggcggcagattccacggaggtggtcgcggaggatgcggcggacgatgtctcggttggctgggcggcttcgacagaagtggatgtttgaataggctcggcagtcgaggtggtctgctcagcaacggtggaggaagaagtttgggtagtctccgcagcctctgtggtggaggagctgctcgagtcgtcgtcaccactgaggagcgactctgcgccgctagtgatggatgcaatggtagattcaacacactcgctcacatcgccggcccaacctcggacacggttggcgatatcagaggcgtagcagtgggttgcgccgcccgcgccgaggttgccggatgagtcgatggagccagagttgtaggtgcgcgcggccttgtagtacttggtcgcagtggcgccggactgagcctcaaagcactgcttgagaccatcgcccgaggcggttccagcggtgccgtcggtgatcatttgcttgatggtggaggcggggcagggagttgtcaagctgccgtccgtattgcaggtgccctcgcctgcgtggctttgcatgagaccggtgttcagaacgccgttgtcggtggactgcacgcgaacgcagcccttgctttcttgcataacaattgcaaggatgaatcgagcgtcgacgccagtctcgctggcgagtgacttaatgctagtgtttatgtcgcttgtttcgtcgtcagagttgtcgcatgatgcggcaatgagaatttggttgagagaccagctagaaaaacggttagctcgccattctgcttatatatttcaggttgatctactcacagagtgtcgtactccgaccattggctcagggaaggccatccgtcggagacatcgccgttaccacccatgacagcataggtagcagcggcgcgacggtgcaagttgtgatggggcttcgcgccatggggaatggcctgaatgagagtggaaaggctgccagcagccaggatctattgcgaaattagtcatggtcgcatggttggaggtggagctgtggaccatgccgcactcgaccactggttcgaagtatagacataccaatgaaggaaagaacattttgatagagggaatgagggaatgagggggagacgacgaaattgaagcgacaaagaaacagtaatgaactgtggaagaagccctgcttgcacgatcgaaagaaagaaaagaggaggggaatgaacttatatgtactcacgagatagatctgtgccctttaccctgccattctcattcggtagagtgatcagttgaggtccacagcggactcgaattacgttcgaatgtggctgtaaaagtggtccaatagcgggcgttggaccttgcgcagtcgagcaccgtacacctgtaagggctgaaacaccgtccgaaaagggacccggccgcctggttatggggcgattggtctgtttcagacagcattaagcccctgtgggcgaacttagttagccttccgaggtgatgacggcgttcattggcgttcatcaccccgttcgtgggctggtgattgggctgggatcatccatgtgggactccgatggcgaagtttgtcctttggactccttttctggccctttctgaatggctgattagtgacgagagacgttggacatttgaattctggttggttgtgtgctgtgttcctgagtttttcccctggtacctgaacggttcacccgtgtccgcgggagcttccaggggttcattgcatgtgacgagtatgcatcaagcactttatgacctgatcacatttggactggaaaatgataaggatgtgggacctgtctattcaacatcagacaaagaggcgaggtaatgtcgggttgcatcgaaatgctcaaataaccgacgaggcgctggtggctgattgtggcctgctttctcaggcattctcactcaaaaacggatttttctttctttcacataaatttcttacggggaaatcatggaggggtactccgtcgatgatctcaattgatcctattcaatccctattagggccactttattatgcattatatttctaccctagctatggtgtacaacatttcggccctattggcttcatctttttacgcttgcaatagccacgtcctgcaatttgaacacaaaaaacacagtcacaacgtacgagagatattgtcaaggctatcatccatattgcaatatagtgcagtggggtgctctcggtaaaacaaagttcttaactgttaacgcgtacttctccgcctgtctaacccacaatagaaggtcaaagaagatcatcgttattcatttctatctctttcaattttacctcgagttgatagtgtacatccaagtcatggatctatcaaacagtgatctcggtcggatcgacacatatcttcggacttccgaggctggttcatgcaattccatgcatctgatgtacaggaagcatgacagtgatagacagagcacctacggagtactccgtactccgcaaattgcaatcacctacctaaccagccatctcgcacatgaggccagccaccaaccagcagtgatctgcgatcccttggtagcaatttcgaattgcaattacaatcgttctttttgaaatcgcctcgtattagactaacatgtcaaggatccgaatgtatggatgccttaaaaggcgctaaatcatgccagatcccccaaggccccgcaatacaaagccttcaatattgattgtgagtaatccatacttcacaccggtaactaatttatattcaaaaaatcaatatttagtcgaaatatattaacaaccgacataaacgaccacctgatcttcaaaatgaatgctgccccgctctgtcttggtttagttgtacagcatagatgccgctaagacatggcgaatccagctgacattccgacgctattggacaataattggaatatttcgatgtcaaggactagttcacccacgtggccactcgttgtacaagaagctaattctcactgctgttttatggaatgcgttttattgcgtcaatattatgtcaaaatagatatacgacaatactagttctacctagcatgttgtagtagcttccacagaggactgtggctgaggctgactgggtaaagctcgagccttatgagcatcagcccattgacactaataatactccgttgtgagtaagtcattgtgaagagagcacggagactctgtactatatatatcatagctttaaccttgttatgaggatatcagattttattgctattcttgaagtcttacgcggtgttcgagtggctcaaagtatgagacatcggattagtacaaggtgatcgaggtgaaccaccaagagttgtcgaataacatgtgcaatcatactgtaagtaattaatctctcggagaattctacagcttttgatagacagaatatccataatttggcccgcaaatcccgtcatctatagtacagagcacgcgcagccaaaatcaatataagcactcatatctcaaggggtatcttgtgattcgtacggagttcataatagtccctcatacaaattcatgatcgtcactcatcatattagctagacttcacagccatcttttttaactcaatgatcagcccgaacagcctcctattaaccagcccctgatagtcccagcccctttcccctgtctacgatctgcgatgcacggaatacaatacagagcgaaggctgacatcatacatacagagattgtacttcgtatgaggaagtacagagtacaccgtacatatatagcgattggaatccccttcgtatagtgacggattaggatttacttcagaaaggtctgttgcatcacgcagtggaatgtctagtcaatattaagtcagtcccgtacagtgatctggccaagtcattgacacctagtatacctagcacttgaagagttgtggtgaattttacgttgagtgaatagatgatatccatgggtagcaaaataaggatccaaggctcacgtgtgacgtatccaccgtggaccgcacctagaaggtttgccgatatcgcggcaaaccttcccgcaataccactgattttgaatactcgatagtagtaactcgaagattccatgttaattcaatctctacaacctgttatcgaaaacaaattgattgagagccgcggtatgttgaagaatctcagcctccgcacggcatcggagggatatttgatccgggaagttggcatcgggaccgttatttcacttcaaccctcctatggtcgcaaaactcattttttgcatcaaaatttcccgacattgagactttgttatcaactaaataaatggcaatcttggctgaaatcatgtaccagcctacgaagagataaatacaaatcttatcacagattggccttggtgagctccaactcagtccaatcccataagcgcttccccatatcctcattgcacgcccaaatgtttcgacgtttcaaaattccaacaggcacataatatcctccattagtgagctcctccttcttcgcaccaacagcagcccacagcgagttacacgcgccctgttgcactgtggaaccaaacaaacgcaaaaacttggtacccaaagcagcaaatatagaagacgaattcagagcgtcatacaaattcgttatgataatacctggatgaaccgacaccgacgttatcgacggataccgcctgctgagttccgcagcgaagagaatattggcagccttcgacgctccgtaccgggaacttgtgttgaccttcttgagcttctcttggtccaggattttctcaaatgccggcgcgaaattatgccccacggaagtgagcgacacgacgcggacgtccgagccaggctcctcggccgttttgagcagtgtcggcagcagcaagttggtgagatagaagtgcccggtatggttagtgccaagctggatttcatggcccatttccgtctcaccgggaggcagagccatcacgccagcattgaggattaggacgtcgagacgggtcgactgggcgttgacttgttccgctgcgttcttgatcgatttacttgacatcaagtccaacggtatccagctaatctcgacatcatttggaacggatgatttaaccgacttgatggcttcttctgccttgactttcgaacgcgcgccgaggaagatcttcttcggattgtgcttggccagctggaggactgtttctttgcccaaacctgcatttcctgtgaacgtgcatcgtgttagatgcggtattaatgtgccgttgatatacggtttaacccaccgcctgtgaccaagatgaccttcccggtcagatctgggatatcgctttcgggtgtgaagcttactgcacccacatagttgagtgcgtccatagcagctatcacccatccagacattttgatgaggggtaggaatactgggattaaggttgtgttcgcgttgaattggttgatagccgatgctatatatatacatataagccggagtaactatcccccgagctgacctgaaagttgacacaaaggctaagcccccaaacttcaaatggtccctgaaagtctgtcattctgaaatggccattgacttgagggttcaaggaagccacctgcaatactactagccgagaaatgcgtggtaggtctacggatagcatttgccttactcggtttgccaagccgtctctggtcttgtacggagttacatcgcatggagaccggggaactgcataattggcagcgaaagcatgaggggcggtgataaaatggtgtaaagcagcttaatgcgagatggtaagatattgagaatgatcgaggtcacaaagcgtgctgtgcacgtttagccaggcacccagaggcgtggctatagttggtggtgtgaaggccttgagatatgagggttgtggtaaagatcaggaagagtttctcgacgagtgcgcatgggatttggatatgacgagctgtggtggtagccgccccgttgtggatgatcagtgatgccagcgaggtgctcaatacaagaaataggaattgatatagaagctaagagctcgtttgagcaaggagaaagcacttaattacacaaggcgagcaaaatctggtggggtatgtataaatgacattccgagatcgaacccaatgcaccttgaagttcaaatatatagctgcttctgacaagtcaacgactgtcattgtgttgctctttctctttcacttctcttgagaccgtttctgcctcaggttgataagacctcccccctacattgttcgatcttccttcctcttccctctctctttgctagctaacaacccatggtccctttcaatcaacttcctacccttccctcttgcaagtacctatcgtcaacctttttattacgtgttggctgaaatctcatccatctacgtatatatattggccttatgggtgagtgagaaatgactcaaagttgaatgcaacatgagaggccattaggccctcctccttgccctacagagcgtgaacgtcaactctggatagggcgccaatagaccacccacgcttctggcgcttctcaacacccccttggtccatgccaaagcagtgttgatgcaagtcatgggctatcaaagcactgctgcttgcgtgatgagggaccatcttcccactgcgtcgttgtccggggccttggtctagaagcctgtggaaactgccattgggctgaccaggacaatcgctcctatcataaataggctgttgcaattcacgcatcccaacaagctcgagatgataatatcaatataccgccaatcgccctcatataatccccctggattcccgtgttggtattcccccacacgaatgttagcgagaacgagcacccacctcaccgatttacacttccgcgggtcctggctcgggatctgggacccagctagggccctataatgggccaagtgacgaaacccaactccaaacaaccatacattctccgctccgtcgagattccattacagaaagtgaagccgaaagcttatacgactaaaaatacattgatataaatcatatgagcacttaacacattcggtaagtttgagtactcacgctatgtctattacaatagaatgctaatatgaggcaaattttgacagtggaaagggcgagagcttgaagaacgtggataattccaccgacgcccctggtgacataggtcttcacttttcattaactataattgatgagaagtcaatgggtggcctagatacattgttttgggttgagcagcgatgccgtcagatcttcccaaagtctcgcgttcctttggagggttgactgtcaaaggccaccaaccttggaaactccaagactcgggtggagttcggggggcctccgctgcctcacgtgccggaagacctgacctgaccctacgatcgttacggacaacataaactcgcaacttctactctccaacaaaggtagaagggcagctaacagatggatggcgctgcgttactttttcattgagaacgcagttgcacaaggacaaatcaacattctccgcgtggacaccaagcagaacattgctgatttcaccaaggccctggcgaaagatcagttcaaatcttcgtacagctgcttggcatgacctgaataaaaggaggaattgtgtttttcatataaaatcttcaagagttgggatagggtctgtgagggggaagatggggcggatcccacatgttgtgtccgtaccgccctactgtgtaggtgtagttgcaactgttcgtcgcctcatgagcaggtgttaaacacctaccagcaattggacaaatttccgacacatatgctggcagattgtgcaaagtccacttccacccctcacaattgtgcctgccaaacctggaacctcgacctcgcgccgggtcgttccttcttaaaccgaaagcgaagtcaaggtttgcatggttttcagcgaggtcgccaggaagtgcatagaacccagtcgcggccgtagattgttttctcttttccttttccagccttgtacttagaaccccgaattgactgtacttctttcttccaaaaggaactggcactcaacacctactactcaaatagtactatggtttggtcttggctttgttttgattgctttctgttggtttttctcttgggatttgtgtctgttttgttgtgaatccggccaagaccttttttcaaccctcattactatcgaatagtccccgatatctacggctaggactccactgatccacttgttcatctatgaatggttggcatagctcccaggatgcagcaaacagtacactcattccgataatcgaaatgtcgagttcggcgaaaaatgcctattcacaatacttttcgcgaggctaagggcttccatgagctcgtcgcttttctgatgaaagtgtttgaggtgatccaactagtcccacgaatgggattgacttacgtgctctctagagagcgtataagaatgccgccgctcgattagacattgtggttctagcagataattacattttgaggcagcccgctaagaattggaaggaattgttacatctgatataccttccgatttggtatatactgagttattaccctcactttctgtgggcgaaagaagaaactcctttgtagaacctcattctatcggaacggcgaccttcatctgtgccttgtgtagttgttaggctgcacttttctttcattttgcccgaagctatgcatgtgacttagattcagatgatccctaactgtgagctgatatatttatatagttctcatgacaccagggtagaacgaatgagtatggatcactttattattcaatcatgcggcgatttcattgctctatcggatcaacaccattcaaaagccgtttaatcttccagagggatatcatcgcgtcaataccgagctgctcctctggtctgaagaacagtgcagtgtgttggaactgaccgtgggattcacggagtttgttgatgtcagactctgaaagaagcactgacagatcaaacacaggaaccttcgacccagtttgcgtgagagccacggagtccaaagagctactcgattgagacccatgatcagcagccgcggaattctgtgagccaagaagcaggactgcaccacattccatacgttcaaatggctccaggcttcctagagcctccttcagcgcagcatccgagtactcgggtagatccagggccttccagaccccattggaggtgtcgacgcgcttgtatttctcgaggactgcactcagcttcttgacaacgacatctctcatactgcgcaacattaatttcggcgtatccttcgaccaaacaattcttttctcatcattcgccttcacaggcccctggggatgcttccaccggaacggcaacagtcgcataatggctggtctttttccacccttcctggagagtggcactgaaatagatcgaataagtggaaggagctcagcaatgcgaatcacgagctggcgtccagtgcgcttatctgaggattttggaattggtgatgcaattaagggacccttctcctggccttgtatcgccatcgatttggtttcttgttggtctggaatggttggctccggcgatgagctaaggttcttggtcttattgctttgcagcgagtcctgcagcagacccacagggatcatataaaggtcgtccgacgttggttgtctaataagcccccaagtccccagcagggcagatggaagtcgtgcaccagttacagagcacatacgtgccggcgaagccagcattaaggcccatgggttcttgagcaggtcggcttcctcctgtgtcgtggggcgtctcttgcgattcttctcaatcccagagcgaggatgtgtaaggagaggggactgcggaagccgttgtgaaggaggagcagtttctggagtcgaattgtctgtttccttttccaacgtagtttcgttgggttggttggtttttcgcgaggtcgcgatgccgcgattgactgcctgagcatgtgaagtcgctagcagttgtcggaacgcactcaggcgccattttgcgtatgggatgcgcgtgcccacacactccattagtttgatggctggggaatagagctgatggtgagtcgagttcagttgagggcggaaaagatgatctcggagctgttccagtagccaatcggagccccttatttgcggagaagtttttgatcgaatagtgattgcgattcgcgttacagggcgtaagaagacctaattagcttctcaaatactagggaaagcttgtctcctagaatcatccgattctagacaaagggtaatagaagtaggccgtcgttggcattgtcgctgttgtccgcctgagctccttatcttagcgccgctcttatcgcgtcacggttcaccgtccctagcctcccggctgcgcgcatttccaactcggaacaactacaaatcgcctttgcatatttttgaagatgcccccaagaatacctttgcgccagctagggcgatctgtccaaacctcacccattgctattgcccggccggccggattcgcacgatgcttctcgaaccaaggacatttgctggcgcagcccccgcggagttggacaccgacgccattcgtgacagagacagtggtatgtttgatattagccatagcaagcaggtacttggtgtgcgtatattaattacattgaacagggaggtggctggcacacgtgtatgttgcgcaattgcatccgtcgacggagcttgcatatgacccgaaacatgatcagcatactaacctgtatcgcgcaatgcagatgatatattttctcgattgatgaaggtaattagaaaccaggaggacactccttctacaacctacccatgctaatcaaacctctaggaacgcatcatctgccttaacggcgaagtcgacgacaccctctccgcttcgatagttgcgcaactccttttcctcgaagccgataacccagctaaaccaatccacctttacatcaactcaccaggaggctcagtaacagcgggtacgtggacctgccccacggctatccccgagctattctgactaacgctctcacaggcctcgcgatctacgatacaatgacatatatcgcctcccccgtgagcacaatctgcgttggtcaggctgcctcgatgggctctctccttctcgccggtggcgaagcaggcaagcgctactgtctcccgcactcctcgatcatggtgcaccagccctcgggcggctacttcggacaagcgtccgatatcgctatccacgcgaaggagatcctgcgcgtgcgcaggcagctcaatgagatctaccaacgccacttaactggcaagaagcagttgtctctcgatgagattgagaagcttatggagcgcgattactttatgggtgctaaggaggcgctcgagctgggtgttattgatgagattctggaccgtagagtccagggaaaggagggcgctggggaagagtctaagcctcctactgcgtaattgcatactcaatgtgtccatggtgctttggtatataccagaggttctaatgtttagcccataggaaggaggtgttggccaataatcaaccgaggaactcgcgctttttctacaaaaccttaggctctggttgtttggtcattacactagcgaccagcactgactaggcccaatcccatcggttggcttaaaaagctggcctgctcccttctttctccctaactgccgtcaactcccgaggtctcttccttcaaaaaagttttttttctctggttagcccagacactattattcggcaactctcgcctgacaaccatcacatctgtgtcttatgtatgtcagaatggaaccgcccggtgcaaggtctagcgatgccgccagcttatcctccatagcaagtagcgcacggcttagtgggaatggccaccaagtgccatgctcgtagtatccaaaatggcgtgttccgccaagaacaaaacgggtatagcccatgcacgctcgtatgaagatcagaagaccatctggagccaacaggattggtatcaactaccaagataatcgccgaagccaccacaagaactgcaatggcactcctcatctgaagatactcctacttattcctaagacacgctctgatcgaaaggtataagaggagagaccttgttcttttcttgggcccatactttaattgttccctctccgaaattgcggtatatacagtcacataattctatcatattgcattcgcacgctcaatgcgaccatcagtcccaacctggagaccaaagcgctgccgaaggaacgttgccgtttcgggagatggcacaaagcccgatgtcgaccgtgccgccgcatttgagtggcgccactgatcacgaattgtacccaggaagctcatgttgacaataacagcctcgccagccgcaaatgtatccatcgggtgctcaccccgaccagcacttccagattccgcgtcggccgggtcagccaagagcgtcgtgcgctcatcttcaacctcttcgtctatatggttaccatcatgagcgggggaaaccgtttcaccgccatcctcttgtcgtaaaataccacgttcttcggcgtcatgatcttgtgactgggacccctccgcatctgggcttgtatctgtgattgtatctgtgggtgtatctgcattgggcgttgcagccactggggtgggtgttccattagtcttcacccgctcgataatcaagcccagcatgatgaaatcgattaggaggattaaaaggtcgaaggaaagaagccggtaaacagatacgggagcctgcccgatgaagtcgatgaacagtcccccatgtaggtagccgcgcgtttcctcgccagcttcgggacggatcaggaaagcatgaaagagcatgcagatgaggttactgccaatgatggcgccgacgaacggttgatggcgtgtgggttcgaaggggggtgcttttggcgtgaagaagatcaattcgacaatggcacgtattgcaaataggacaatcgagcagctagacatatgttagggttcgccgcggtgagagggtgggaccattggtttggggttgatttactccatgtaatacagggcggaaagttgacaataaattaatatgtcgagatcgcgcagcaatcgatcaatgaacgcgactttggcagttgatttgactttcttcacacgcgcattttggctgctgagcgtgcctgttggcctgggaggctccgcatcgtcataggatatgccggacacgtcagcgatgtattccgcatcccgaaaggcatcaacgtctgtcatagagggtcatgagggcttggacagtatccaacaaacgaaggtataaggagtcgaggtggagactccccgtgatttggtgagctggggtacagtagttccggtgtcaccacctacactgtttgattgcttgatgccaagatacgctaagctatctctggcacagtcagctgatttgcccgataccttcatatccagcttgaagagccaaggtatgggtttatacatggtctatcttgcttagaacgtcaatttaatatcgccttctcaatgattgattcacgtgaaggccttagtttgcggtgggtctacaaaatagtcagtgtgttttggattatgtttatagctcaggttatcacgtgatatatactccaattcgaaatcgcaacttgctcttattcaacatcacattggggtttttgtttttgaagaaaaaaaccaatcatggataactctgaatccaatctgaatgtagcaaattatgtcttggaatctggacaagctgttcaaagttatgagctcatacgtcctgcaggtcagtgttgcctattttcttcgacctaaacaaacactgatatcaatgaaaggcgtcatcgagagcatgtacaaaattcatcatgatctcggcatcttttcaaacacaattgtttgtgcgacatatgagcgagcagacaatatgcccctaactccggacataatgtacaaggctcttcccctggtgatttcggaacatcctgtcttgacaacaattgtggtgactcaaccatcgacgaagaagacgggaagaaaaatgacttggcaggcacgtctgagaaagatttgtttcaaagactgcgtcagatttgtggatattgcggctgagaaagagcagtctattcgattgctgcaggaggagcatgacacctggttcaataccgaagataagacgaaaccgctgtggagagttgtggttaatggctcgaagatattattcatctttcaccactcagtctgtgatggcaggtcagggatgatattccaccgcagcttactcgctgcacttaataaagtgaccagggcgcaacatgagagtgggaaagaggaagacataccaaatgattttgatgtgccaaatcatgagctgaagcctgagtcaatggctcttcttcggcttctcggcatgaagttcagcttattcattggtctcctgagctacctctcctctcttttaatcaaggtcttcctacggaaaaattatactttcttcaacgatgtcaagttcgaagagggtttgccctccacagacaacccagtacctctcgcccagcggccagtcaccaaggttgaaaggatgtgcctcagctcgtaccaactcgcagcatcacttaaagcctgcaaggaacataaaacgtcaatgaccaccctcattctaactctgattcacgcgacccttgcatcggatgtttatccaacggcaaaaatggacttatcgtatcttgcagttgacctgcggcgtttcctgccggccgagttttctaacactatgggcaactatgtgtccagtcatcagaccaattactggctcggcaagtaccgcagagccggagctatatccccagctaacgatacacaaattgcgctcatatggcagctaagtcaaaaggctaaagctgaccttgattctgcgatgttcacacatcgcacaccacttccagtggcgaacgctttgggattgacagctattggggaagatgatgagtctatcgcagcgggaatatacaatgttttagatgtcgctgtcacgaagaccttttgtgtgtccagcttggttgaatcagaaagccaatcatctgggccttggcagctgaaaggtacggagttctctgtggcagcgcagaaggcacgggtgggacccatgttgtattttgcaatcggaagcatgaaggatggcgagtgtgtaatcaatgttagttatgaggagggtgtgctccagagcagagttgtccggaaaatccttgagggagttgagagacggctgattatattgttgggagctgaaaatgcaaattagaaactgaacattgatgtaatgaggatttcagaacccatgaatgccaccaaaaagactcaaatcaccttgcctccttcgcttcttattcctaatgtaatttatttcgtaaacggcctgtgaattagtacattgtggcttgcttccctagtaactgcaggtactgcgccctgttccaagcacccaatagcaaaaatacctcagcgacgatctgatatctatacctagcagccgagtaagcagtcactaccaaccagcgccctttatttctcaaacccgagaacccgtgagagatccgagaaccaccaagcactacggcaatccgtcccgcaatcccgagtcactacggagtatacttgatcttcttaggctcgttatcgttatagaagtggctgtgttatattatttatatatataatttacggtataactagttatttactataactaagccttctataaatagaccaagctcttaaatgggcggtcaatttatgagcggttatatcggtagccccagggatttaccacaatatccacggggcaataatattactgaagaataatatgactgaagaaaaagctgccaatcactgagcgccaaggtcactctgttatgcatctcctaaggatctgcatatctttcgattttaggggcgcgtagtcaaacagtagcttccctctcagccacccctgtgaaatgcactaacgctggagggtctcagtggctatattaaatctgctatggcccttgattttatgaatattgacttattgtgttcaactatatatcaaaaatgaacggcacaattataaatgactgggttgacgagcctgatggacgagggacgtggggtattctatccacttgcgttctaacaattattctctgttgctggacatccgtgtccccaaatttacctgcgcaaaccgatggcgcgtttacgagatggcgatacaaattcgatctggcttgcattgcactgcttggatctgagttcctattgctgctggttctaggacagtggtcgtccgcccgccgttctattagagtaggtgataacttataagctggttcccaagcgacgagaaactgacagaacaggatttccacgacgccgggtataaaaattggacgattaagcatgccttcttcgccgatatggggggatttttaattgagcctccggagatagattgcttgccttcattccctctcaacggcaaacagctttttattttggtcaaagggggatatgttgattatccgagtataaaaaaagaggaaatcgaagataagagcaaatcagatcggcttgctaggtaagttaaaaacttacttcagtcaagccttttcttccgcttcttatactgactgtggcgggtagattgatcacaatagcccaagccctctggttttgcttgaattgcgtctttcgttttgcacagggacttcatgtcaccactatcgagcttaccacgctttcctttattctaaactttcttgtgacgtcttattgctggtatcataagcccatggatattgaaagaccagtcactttaaagcttaagagctctgtggctatcattcgcaaaaagctcgaccaaaacccagagtcaaagtggtatgaaacgccacttgacttcatctctcgtaatgagtggttttactctcggttttggagatattacattcaaatctcgcactctatgcgaatcccgctatttactcgacctacacgacgcccgtatgatcgcattccgagccatttcataccagtggtggatacccaggccgaaatcatctgtggcccagtaattcttctcttcagttctatttttttaattgcgtggaattatcacttccctacagagacagagaggctactttggcggattgctagtgtcgatgccctagcctacgcattggttggaggtcttcttgcgctatacttccacagaaccatattccaaccggacctcccatataccacagcccaagcttcattcgagcaaaaaggagaacggcatggatggattggtcgtatcgctgcgagattgagaaatattgatcctgagcaggacccaaacttggaaattcctattcgagctttggttccgatttcgtttctctgtgccatttacgctattggcagaggatttatcttaacagaagatttgattgggttgaggagtttgccggagagtgcgtttgagacagtctcgtggtcgaaatatgtacctcactggtagccatgatgcgctcaccaaatgtgcttcacttcaaacactacgatatcacgaattttcagagattactcgggcagctccacgtgccactgtcactgtcactatcacctcccccttcttcctgtctatcactatcatcttcatcactgtcgctgtcatcattaacgttgttttcgtcattttctttgccttggctcatggaagccatcaccctttcactcacaaactatccttgcgtttactctataaaggtaatgaacgatattgatgatactataagtacaaacgctatatttgaatcaatataagtaatatatatacactccgttcttctgagacttggaggcttgaaaagtctataactagaaatcgataaacacgataaggatgttgatagatttaaaaacaattttgtgactggacctcgacaacgaaaaatttgggagaaacaatgaggttcgagaattcgaatactcataatgaccagctaggtttatttgtgttcctttcagatcctttctcgcggttatctttgtctgcttgacagagaatcatccacagcaaacaaagattccaactaagagacccacttctagcgaacactctgtaatccgattgtcagatcacctatcaaacggaagtatcggctctcattggtaacaaacataacatcctagagccccgtatcatactaagctaagtctgctcgacatcatgtgttacgatcgcaacgtttgcttgtttgttatttgctttactgagcgagagttggtaatttgcattgtttacaaagcggtcaggacacagctataagaactagctgtctcccactttgcaacttgcttcttctttctcccctatcttagttattttgtattgaatgcactctgctatctctgaagacctggcacgtcacattataagggagaaaatgacagagagcgtgtatgaatggcgtgatggtctatcatacgccaaattatgctctcgcggcaccaacactgggcaaatgttccaaaatccgttgaaatcactatacttgttgagacctagctttgaggtcacagagtatcttgacagcggtgacatgaccgttgctcactgcccattgaagcggagtccggccactattatcttgggcttcgagattcgctcccagtttagcgagtgtctcgatagtaggaatatgaccgttcattgccgcgtattgaagcggagtccggccatcattatcttgggcttcgagattcgctcctagtttggcgagtgtctcgatagcgggaatatgaccgttgcttgctacgcattgaagcggagtccggccattattatcttgggcttcgagattcgctcctagtttggcgagtgtctcgatagcggtaatataacctttgatcgccgcccattgaagcggagtccagccatcattatcttgggcttcgaggttcgctcctaattcggctagtatctcgatagcgggaatatgaccgttgcttgccgcgcattgaagcggagtccggctattattatcttgggcttcgaggttcgctcctaattcggcgagtatctcgatagcgggaatatgaccgttgcttgctgcgcattgaagcggagtccggctattattatcttgggcttcgagattcgctcctagtttggcgagtatctcgatagcggtaatatgacctttgatcgctgctcgatgaagcggagtccagctatcattatcttgggtattgagattcgctcctagttcagcgagtgtctcgatagcggtaatataacctgtgatcgccgcccattgaagcggagtccagccattattatcttgggcttcgagattcgctcctaattcggctagtatctcgatagcggtaatatgacctctgttcactgctcgatgaagcagagtccagccataattatctcggacatcaagatcagcttttgccgctttgagtaaccgcacggtatttacgtggccgttgaaaactgctagtgacaaagcggtttcctggtcgcagtctttgagatcgtgtttggcattttgcttggtcaggacatgtactacatcttcatggccccgaaacgatgccatatgtaatgcagtctgcttcttaacaccagttgcgttgatatcccacttttgtaagagttcatccacgattccagtcacattattcatcgctgccagatgtagagcattcaatccatcttctcgattcaagttaggagtagagcgtgccagcagtatcctcatcagttcttcattgccacggtctgccgcgaggtgaagtggttcttcgccactggcagtctgctgttgaggattcaaccttttgacaagcagcttggctacctttgtttggccataccaaacggcatgatgtaatgcagaccaccctgatttatcactttggttcggatcccgtatcttctccaggagagcttttgtgttgttgtaatcaccttcaccggcggcctttatcaactcttctgataatttcaattggtcccatgcggtaaggtcaagtgttttcaaatcactttcccgtttcctgtattgcggattgagtaaaccatttttcatatcctcgatcatgctctgagcattttggctcctttcggtgctttgatggctgccatcgtgcgtcgtctcatcttttccaacgtgaatcttgaatagatcattcgggtcaaaatttgggatatttgacctgattaatggcggatggaaataaaccgggccgacataatcacaataacaatcgaaatgaatcttatcgcgcctaaacgaaggcttgaccagaaggcctctgcttattctagtctcactaagagtgggatcaggctcaatgagtaggatatgcttgtctttctctttttgggcgaggcgaacctttccttctatgagtggatgggcatgacctaagacaacgctttcgtctttgagaaaatcaagagaaatgatattccaatctccgaacaaattcccattctcttcaatctggaggacatcggctgaaagtgtaacaggtagatcatagatgtttgtagggcaccagttgtatccattcgtcatagttgctgaattgtggaacagatgcgcatgtgatattttgccaagcttctgcagaatctcttgataaatcttctgttgggggtagttttctggcaattcgattccaacaatgagtcctgaaatgatcgccatgtctcttggccaagatgtgtggcgtgaactgagaattgctagaagatcatccaatccgtcaacttcttccctccgaaatcttttgagtatgtctttcgcaagttcatgcttggtggtagggcaatcattgctctttgcttgtaatatgtctctgtctaggtccttcgtgatcgggccctcgggacctttgaaaatgatttgaacagtctgggacattttcaactccaatgccgtccagcctcggctgaaccaaggagacataacgatataaaagcatgctaagtctgcatcacgccattcgcgctctctaaggaaacaatcgtggaccagtgtgaccgccgcggccttgtagtttaggtgcatgcgctttaaagctttttcgcgaagctctttctttgttggaatgcagatagtatcccaccagagaccctcacagttgaattcgagagcaaattcttgaaacaactccagcaagcagctgttcacatcgccgcgggcttggcttccggtgccggtaccgtccgaccatacatgggatactgccatataccgctcgttgtgttgaagagttcccgtttcccataaataccacgctgtgatttgttgctccttgcggacagctgcttccagggtttctgaagggaaattttcaagaggacagcggcttccatcacaaggcggttcgtggcgctgtgtcaccagagtgaaattgactcgggattgctcgcaaaaatcgaaagtacacagctgatggtcttccttttttgtctcgtggggtgaattttccagcgaagggagtaatttcgggaattctccaggacctcccagtaggctcttggctatcgcccagacgcggttgcgacaaaagcccaattcgttcgtggctttgtcgactgctcgtaaggtggcctctgtatcggctaatgacaaggacatggctctaggggatttgtaaaattcgaataaatggtgtgatactggattgttcttgaaaaatagcagcgttatggaaaatttggaaaagctgacacagtgccagtgattaatattcccaaacatgggcggctatggagcagggccatatctccggagtattggcgctcgaggggtgatgcatggctatgtgcatatgggcaggagttctcgtgttcgaggtacgatggcggagtccaatcgagggtccgtgcagtctcgattcatgcttcgcccacttgactggaaatgaatcgaatacaaactgttgaggcgaagagaaaagaagaagaagaagaagaaaagcagttttgaagaaagactgagcttctcaaggaaaattatctgagagaataacagccatgctgaactctgcggaccctgtagagtaatgtgacggaaatatgcagtacgaatgtaattctctgctctctaggaaatcttggactaaataatttgaataatcaacgtgaatgtgcggaagtcgggtcatttgaggttacttttggttgagttgggtgacagctagtcacccgcgcactaacctaacacgctttgggcgtctctttcatgagtcggccactcatctcacggccaccacgaatgggttctaacggtgcgaagtttctgtggtgtaatctcggcgctacatgcatgtaagtacccaatttgtcaacagggcctgtgcctggccaggactgttcgtacccccaccacatccttctggatttcgacgttcaacggacattatattcctcattacgcaattttcatttgaacacaattcttccttcttcgaggaagaaatcatggcgccctttctcgctaccttactatcccgtgaacctcgatttgatccgactgtatcctctaacgaattcaggactcaatgggtccaccctagcgatgtattttccgtactactgatcctgggcggtgatattgttgctcgcgcgctggcacaacttgcaggaagtggcctgacgccagtcacattctcgtttggtatggcatctttaagccctattctaacgaagattccatgctaagtcgatgtactcgaataggatgggttgcgtactccgtctcggcgcttgtatctgccgttggcgaaaacaaactcatgccacagaacgtggattgcaaatgcaaagtcatcaatggcaagagtggatacagtagagacaactcgagctgggttataggccgtattgtgcgcgattttgatacatggagcggcactgctaccaaagagaagaccaaaaaacttctgggagaaaagtgggaggaactcaaatccctcgataaggctgcagaggagccaacaagagctggtcttgttgttactatctacgagccgagtgcgacaccaaaggccggcctagctaaacgcgatcttattttttggagcggcttgctcatcatgttattgcaattgggaattgcggctataccatgtggacttttcggcgattggggcattttgataattacggcatgcggcaatgttcttgccatcgtgactggagttctcccacaatggaagaaggaaaagtgggcgtgccggcctaagtccaagtattcctatattctcactcgaggtaacggtgcgcaacatgccatcgttattcttggtaatggacatggcttgaaccttgaggatttggcatctggacagagcaatgttgaatcctctactaataccttgacccgagctgttctcctcgccctctctatattctgggtacttcttctcatcgccgcagcaggtcttaggggaaacacttggtttcttctcgccatcggcggtattggcattgttcagaatgttttcgtcgctggtcgaagcatgaagccggagaattatggcattcatctagattatgtcggggtcttcggtaaaacgaaagtgatggatacactcttggatgttgaacagaagtatccaggcataggtcggagcatgcgtgacgagttctttcccggaaagcttcctctagccggagttcgagcgtgggaacagatcgaacaatccactgaatctgagcctcgagcgaaagcgcctcgggagtctcaagatgactctgaagaaactcaagctgaagagcgtcaagttgaagagcggatctaaaaagatccgaggacggctattgcacttatgattcaacgtcatcgcatagatatattgttcggtgatcgctattttcgacctgttcttgagcttatgatgaggcccaatcttctcccacaaggccggtaatgataggaaaatgggacggggagatttcattcataacctcctcggctctaattgatgcatcctcctattattgtgtttgattggaaggtctaaatcatttcttaccggaggaatcaagtttgattaacaggagcatttatttgaaaaatatacgatgcattcccttgccactctttgttcttatgcgagtccgagtcatcgcacatgccccgaatgaccaaacagggaaatgattcattagcctgcgacctccatctcaaagcaaaaaacgtcttttcccgctggaaggctatcccgaattgaagcatcctttatcaattgcttggaggaagtaagtcgtagtttataacagggctatcctcgtgctcggtccgctcgcgtcgcggtaccaaattagaagaatcatccgcacaaaacgcagcaccgcatgttgagttatgaataacttcgggctgaaacagtatgtctgtgactggttctggctgttcgtactactacttggagctctgttccttcgtatccagcaggcgcattgacatcagcctttgcggcgagaagtcgctctactacctggagatggcctccatgcgctgctgcttggagcgctgttcctccgtatccagcaggcgcattgacatcagcctttgcggcgagaagtcgctctactatctggagatggcctccatgcgctgctgcttggagcgatgttcgtccgtatccagcaggcgcattgacatcagcctttacggcgagaagtcgctccacgaccttaagatggcctccatacgctgctgcttggagcgctgttcgtccgtatccagcaggcgcattgacatcagcctttacggcgagaagtcgctctacgaccttgagatgtcctccttgcgctgctgcttggagcgctgttcctccgtatccagcaggcgcattgacaacagcctttgcggcgagaagtcgctctaccacctgaagatggcctcctcccgctgctgcttggagcgctgttcctccgtatccagcaggcgcattgacaacagcctttgcggcgagaagtcgctctaccacctgaagatggcctcctcccgctgctgcttggagcgctgttcctccgtatccagcaggcgcattgacaacagcctttgcggcgagaagtcgctctaccacctgaagatggcctcctcccgctgctgcttggagcgctgttcctccgtatccagcaggcgcattgacaacagcctttgcggcgagaagtcgctctaccacctgaagatggcctcctcccgctgctgcttggagcgctgttcctccgtatccagcaggcgcattgacaacagcctttgcggcgagaagtcgctctaccacctgaagatggcctcctcccgctgctgcttggagcgctgttcctccgtatccagcaggcgcattgacaacagcctttgcggcgagaagtcgctctaccacctgaagatggcctcctcccgctgctgcttggagcgctgttcctccgtatccagcaggcgcattgacaacagcctttgcggcgagaagtcgctctaccacctgaagatggcctcctcccgctgctgcttggagcgctgttcctccgtatccagcaggcgcattgacaacagcctttgcggcgagaagtcgctctaccacctgaagatggcctcctcccgctgctgcttggagcgctgttcctccgtatccagcaggcgcattgacaacagcctttgcggcgagaagtcgctctaccacctgaagatggcctcctcccgctgctgcttggagcgctgttcctccgtatccagcaggcgcattgacaacagcctttgcggcgagaagtcgctctaccacctgaagatggcctcctcccgctgctgcttggagcgctgttcctccgtatccagcaggcgcattgacaacagcctttgcggcgagaagtcgctctaccacctgaagatggcctcctcccgctgctgcttggagcgctgttcctccgtatccagcaggcgcattgacaacagcctttgcggcgagaagtcgctctaccacctgaagatggcctcctcccgctgctgcttggagcgctgttcctccgtatccacgaccttgagatgacctccttgcgctgctgcctggagcgctgttcgtccatttccctctgcggcgggtgcattgacatttgccgttgctgcgagaagtcgctctaccacctgaagatggcctccttgcgctgctgcttggagcgctgtttggccacacactcgtgcatccacgtgggtgactacttggagcagacttggtagtaattcactgcaaccttctctcgaaaccaaaaacaatccatgattcatgagagcaggagaatcgcgtccgtgttggataatacacctggcgagacgatgatggccattggtgatggaacttcgaagtatatgacgcttgatgttctctgttaaaatataaggctgacgccttatatagtacaaaagcaagtgataatgtccatatgctgacaaccattgtatcgtctgcggtacatcgtttctatcttcgtaggccttctgcgctgactcccatggtctgtatgcaacaatatcattcccttctacacatcggcagaacaatgaccaagccatatcctcagattcgggatgtgggtttgtgaggtgattgatccagtgatttcgggcgtattcgagaaagtgaaaacctcggctttggagttccatctctagacgtgaagactctttgtcaccaagtatttgttgggccttcctctctagctccccagcgctgagatgccgtaacttctcacggtaagaaagtagcctcagtgccattcgaccagtcatactgctgtaactgccgaagggggacattccaagctgaacaggccgtataggagtatttgaaccattctgaattttcgtcaactgacgcttaaaatcagtgaaatcgaggtaggtcatgcaaagaacgccgatatgccaatcaagtcccgccatattgaattcctccgagtgtcgggagttcgtgccaaaaaggtgtttcttcacgctatgatgaacatagtgcacagtgctgtcctcttcgtcgatgaatgttagaccacaacaatcaccaatgaccttattcatgtcgttggggagcttttttcggtcaagagacatttgtccaggaaaaagacctaaaacctcctggtattccatcgctgtcaatggccgcttcatcacaccacaaaattggagaattttgaacgcgtcttttcccaaggttctctcccgtacacggctgagttttctgtcaaatatttcagataggccacgagggggatgcttcaatgcatctaagatgtcgctgtcactgccttgttcgcagagctcttcgatgaaaagacgcgtccagaggaacctttatcgatcagcctagatacttgcaacataaaagtccaacaactttcactcctaatgataaagaattcaccaggacttcatgcctagctcgattgataaagatggtggaaaacccctcatcccgtcgcttgaattggatcatttcatcacttacattccgttggatcccttttttagggtttcaaatatcttcacaatgagcgtgggatcccccaagatcaattgtttgtcttctaggcagttgcctatagccgcggcaatatagcgatccatctccaagtcaacttttgtctcggtcaccgggattttgtatttgggtttcatggctccaaacaattggttttcaagctccgggcggcctgtatagagaactttgaagtttttaacgcgcatgttacaaagtttggccacactctgcgccaccttccggatctcgacaggttcacattcatccagtccatcaatagctagatagtatgtattgtcatcgtggagccgagacagtacgaaatcaactacttcagccgtattgaggtcattgctatcctcgtataggcgttgtagactttcatcttcagcgtgtttgatctgagagtctaatatttgacgagcaagactcccgataatgtttctcgctgacagagatgcagtgttgtccgcacgacaaatgtaataggaaataatgtcattggtatttcgtgaggcatgaagttgggcaaccacattagatataagcactgtctttcccatacccatcgtgcctgggcaccagagaattgcagtattttggtcatcttgccaatcatggaaaaggaactcttgcagtagccactccgctgtggagggcacgcgttgttggatagcttgcttccagggtttgacgtagtcgatggtagaaagattttgtctaatgctagatctcaagcttgcagcttccctcttcatcatgtggattctccactggtgcgcctcagtgtgttccttttgggtttcttttcggaatttatttgtcaactttcgggatgctgcgttattttggctctcgttttccagcaatttttttgtttcctcgttagcctgctttgaggcaagtgatatctgcagctgtatgtcctttgtagcttgctttagtttatcgagagggcttttgaaatcagactcgaagggattgaaaatagacgataaagtttgcgtgatcggcgggcgtcttgatacttcgatgatcttggtacacaattggacgatggctgcatagtactcgcatagctcacgttgaaggctgatacagtcgggataaagttgaccaaattgttgataggttggacacgaccttccgatctccataatcatttttgtgaccttgtcgaagtaagatgtaatattgcttgccgtcaatatagccatcttaaccccccccccccccccggggggggggggggggggggggggtcccaaacgccccctccaaccccttccctcccctctctgcctcagctggcccctcctctcgccgtggccnnnnnnnnnnnnnnnnnnnnnnnnnnnnnnnnnnnnnnnnnnnnnnnnnnnnnnnnnnnnnnnnnnnnnnnnnnnnnnnnnnnnnnnnnnnnnnnnnnnnnnnnnnnnnnnnnnnnnnnnnnnnnnnnnnnnnnnnnnnnnnnnnnnnnnnnnnnnnnnnnnnnnnnnnnnnnnnnnnnnnnnnnnnnnnnnnnnnnnnnnnnnnnnnnnnnnnnnnnnnnnnnnnnnnnnnnnnnnnnnnnnnnnnnnnnnnnnnnnnnnnnnnnnnnnnnnnnnnnnnnnnnnnnnnnnnnnnnnnnnnnnnnnnnnnnnnnnnnnnnnnnnnnnnnnnnnnnnnnnnnnnnnnnnnnnnnnnnnnnnnnnnnnnnnnnnnnnnnnnnnnnnnnnnnnnnnnnnnnnnnnnnnnnnnnnnnnnnnnnnnnnnnnnnnnnngccccagattagggcggcgatttgaggattggagctgataaatgtacccacgacatcactgaactgttgtgtcgcctccagaaatgtacacaacctcggtgccacacatctccttgtcgtgctgttgttggcgtcgatctccgtcacgaatgcgatgacgctcgcaacgtctggtttcgtagcgctgactttatagagtcccctttgctcctccgtcagaataccctcgaattcaatcaacgcctcccggagagctgttgtcggatgcggcacccgtatcgaaccggaatgagacaatgctacacaagccatcatgtcctccgcggccgccttgatatcaaagaaattgcgatttgtcgaatttttggacaggggatgggagggttcggatcaaatctaaagatacgattcccctcagctgaagggggctgagggtggtaaaacgtctaagccacgttttgtcaggcaacaagctgaagagcggcacaatcttagcctaaagtatgggaagttctagccactccatacagtaacaagacacgatgtacatgtatcgcttggcgtaaagaattgtatagtacactcacccttctcacccccggtcgcgcgaccgtaaaacggcgctcatccatttctcacccgggcgacacccacccgactatcgactgcgtataagccacacgccgctgagttacctagttataagctcctcgcctacgtaaggatcacgttgcggggtgacagaccatcgcagaccaatcgcattagaaattcggaggctaagaatagtccggggtagtagttgggtgggtgaccaccagcgaatcctcactgttgtatgtttttgttttgctttttgaggtagagaatggccgtttttggcgtcaattctacaggtcctcatattctggtgtagactactgggaatctgggatattaatacttcgggtagtggattttcctcggcccggaccacgtgctttccccaaggtacatgcagtgatgcacagtacgtttgtgttttattttaagatgtttgagtgtttatattcgaatgcttggaaatggaatactggactgtttgaatagtattgattgtactacttcatctacttattcacggtaagcttaatccacaatgatcttcttcgacagctctgagtaatgcttgaagaagccagtgaacaaacgaatggcatgggcaacatcataagtaccacctgtttcacggatactgtgcatactgagctggggattgcctagatcaagtgtccgcgcgcccagcgcagcagacagcatagggccaatggtgctgccacagctcgagtcattacggaccacaaagagctgaagaggaacgtggacgccagtctccttggtggtcttgcgcgcaatctcctccaggagaacaattccaggagagttcgtcgcatagcgagcgttggcgttgatcttaatcaccaagcctttgttcatctccggcttatggtctgattcgtacttccccgaatagttcgggttgaccgaatgagccatgtcggcagagacaaggaaggaggtggacagagtctgctcgtaggcagttgacaggtcggtgctcttggaggaggaggatgggaggacggatagacggcgaatgatcgatggaagaatgttcgagtccgcaccctgtgctgtgcggcttccgatttcctcgtggtcaaacaaggcaatcaggcggatcgcttcctcgtcgtcgagggctgatttatcggccacggagtcaatcagaccaactgtagcacagaaagtgctgttcaggttgtctagacgaggggagaagatgaattcctccagcataccgccgagacaggacttttgagtgtcgaagaggatcatttcaaagtccagaatatcactgggactgacaccagcctcgttagcaataagctcaacgaagtgagagtggtgacgttctgtgacagatttcaatggtgagaataattccccacccttgtctgtatcaggggtgtcggctccatcattgcggttaagctctgcagcaataaggccagcgatagggaacagctgtgtttccttattgaatgaaaagttttcctggcggtccagatggatggccagtgttggaacacggaggactaccttgttagcaaggcacatttattgggtcaacatgaaacatactgggacggtcaatcttgaccagtttctgcacgatggatccatcgctttcgcgagtcataacccgcccagcgacaccgagatcacgatcgaaccctgcaggaaattagcgactatgatagtttgaaggtaatcaatggcacgtacaagtgtgccagatgcctccgccgtaggtctctacaccgacctggacgaagccttccccgctcttcttgctaacgggtttgaccctcaacaccggagagtcggtgtgggcaccgatcatagagatggcattgcccggctatattcattgacatgattaattgaaagaccatttacgcagttccgcaatttatacatacctgccattgcttgccgatcgcaaaagccacgagggtagtagtgttgcgagtcaagtagtacttgcctcccggttggcaggtcgacgcccaagagtctctttcctattgatggatgagccacaatttattactccggtattcagcttgagccgaccttgatttcttgaaagccagccttatccagaagctgtttcgcttcgtggacggcatggaaagctggagataagacaaatcagcgacattccacgtcatcgatagaactacatacgggtaggagcagcattgacaaaggtcaagaagtccagagcaggttgcttggcagccattgtagaataacgtcgagaacaaccaataatatcaggacaaagacgcctaaggaccattgcagggtgcacaaagggagagagttggcttttgccgccggaggttttaattggtttggcggtgactgcggccatgtcacgtaacaaagccaccagtgaaactagaagggagtcttagggccattgatattcaggtattcaggacatggtaggtttcaattattactatttgaacatggatatactattctttggtcgaccccactatgtaaattcctagaagtcaggcttggtatcgtcgttgccatggcccaagcttcgtcgcgtcgcgtcaaagcaagcgcgtatatcgaatcaataatctgtggatttcgcgttagtgaaacggtcaatatggagtacagatccctcacatcccccccactttaagtggtccagttagacggtgtgggcgcgtccctttctgtaaacaacaggactaacactgtggcatcagtctcgattggaacaaagccatgctgacacaggacgtttccaggaatctcggcaaacagcatgagacatagtctgggggagtaaacaaaagagatagactccactgctgaaataaattgtcgatcaaatatcaatgagcgtagtcaaaggcaaagacactggatggggccgattgccctcgctaaatcgggttagcgtacccgacgcgtgacctagagagtcgccctgcgcaactccgtcactcccttgaagacattcattcattcacatgccgacagtttagacgcttctgtgttcatttcctggtgaaagagggtttgatagtgctttatcccggaacttgtgccattttcaggtgttaacagccggggcaatcattccacctttggatcaacaacaacggaccctccgccaatcgcccttcaaatacccttgattctacacccgaatctctgaacgttcgacatccttgattcacagaacttcacttacatctcatgcaattcttatctctatcttgatcggctgcacttcgtctctggggctcgggcagacagctagggaacgccatggcggatagacctcagaatttaaacaaggccgggaataggtcggcaacaaaaccacaaaaatcgcaggtctcaaatatcgcatcaccacctggatcgaagacaccgccaagcatgccatcaaagcgcacgatgtattttccagacaattcaaatttggggaacggccaacggcaggatggagcagagccaatcgaccctagtgcgcttgcgaaagcattgaaggattatgagtctgctgggagccggcgggacaggaccccagcctccagtccgtgtcgcaagagacagcgggtctacggggatcggtaagccacacttttctccaatcagaaagctgcgccaaaacaatggcagtcatctgtgactcagctactgatcataattcagcttcattcccaatcgcgacgggcaagatctacaagcgacctatagtttattgcatgaagatggctgtccatctactccttccaagaccaagaaacgcccccctcactccgagcttcatttccaaaagagtgtgttacatctcggaacccaatgcgttgtacatttgacctgactttaaccgcagctgaggaagccaaccgtacattttcccgagttttgcgcagcgagctgttcggaaacacggtcccacagcctgacttgacctctgcgccatccgacccattgctcggcttcagcaatggaatcaatgacaagacccgatcccatacacctcccgctcatatcgcagccaatctccctcctgccagcatcaccccaaccaccccacacaaaaacctcttcaactatgggccttcacggcccggatcgggacacccaaccccctctaaaacccctcgaagtgtgcatggccctaacttagacgtgcgctccgagctctacagtctttcccctattcgatatgacagtcagcgtattctggaaacgcctcggaaacaggcccggtatgtgaacaaggtgccttacaaggtcttagatgcgccggatcttcaggatgatttctacttgaacctggtggactggggcagtagcaatgttctcggcgttggattggcaaactctgtctacatgtggaactctcataccggtggagttaccaggctgtgcgagctgaaagatgataccgtgaccagcgtgagctggattcaaagggtaagcaagaagtctgcatgttaacgctccacatatcatactcatacaggaaatatagggcacacatcttgcaattggtacaggtaaaggtctggtacaaatatgggatgctgagcattgccgacgactacgaaccatgattggacataccaaccgagttggcgctttggcgtggaacgatcacattctcacttcgggatcccgagaccgtctcatttatcaccgtgatgttcgttctccagatcagtatattcgaaagctcgctggccacaaacaagaagtttgtggtttgaagtggaacaccgaagatggccaattagcatccggcggcaacgacaacaaactgatggtctgggataagctgagcgagacacccctctaccgtttctctgaccacaatgctgcagtcaaggccattgcatggtctccgcatcaacatcatcttctcgcttctggcggtggtaccgctgaccgcacgatcaagttctggaacacacaaaccggctcaatgatcaaagaggtcgacactggtagccaggtctgcaacctatcttggtccaaaaactcagacgaaatcatcagcacacacggttacagccagaaccaaatcgtcatttggaaatacccgcgtatggaacaaatcgtctcgctgaccggtcacactttccgcgttctttacctcgccatgagccctgacggccagactgtcgtaacaggagcaggcgacgaaacactcagattctggaaaatattcgatagacgtgctacaagagacactcgtcgggaaggcagcaaactggccgaatggggcaccattcggtagttcgcaatcccctctatttctaatttgcctttgcatctgcattcgatatggcgttttgcggttcacttaatttggtcactgggggaaaatcattgcatggcctgcggggatctgactcttcgtctttttatgcgtcggcatctattgcatcttcttttctatcggtggtttagagcatttcaggtggacgtccggcgctcgttcattcggaatggggtaatgcttgtttgagttttttttttccttcaatttttctttgctttttctgttttttcttgccttttttgatctcttccatcggttccttccaactctggctgtgatttagcctagttatactagccagacgccttcgagtcaagcgaacaactttacatccacgtttcttgggctttgagcggcggcgcttgtggtgtttcctggttgctggtatgcggcgttgcgcggcgggtgttctcattgcaatttgtctttcgcagggttgcttttgatgatgagatgaccctctttttctccggcacgaatttgtgcctatgttcctatttcagaggatttagctatgccaaccggccttcatggggatatacaccatggaaatgagaatcaaacttgataatcacttacatgtttcttggaagtccaaggctgattcaactcaactaagaccaatttttattattgtggttcaattccctttctcaagtgaagtaacccaattaagaaaatatccgattaactatgctatactgtatacattcatgaatgagtctcgcttgcccagtttttggctcagcaacaaacaaaataaaaagctcaaaaagggagatttgaaacataaggaaatctaaagcaccaagcgcgccggctcaacagagagaagagtcttgattcgctccaagaatgccttcgcgcggacctcctcaccagcagggactgtcaagctgaaaacattagaagcaacacccgcgctctcaaccgaagctgcaggtgcagacttcttggacggcttggcactaaggaaaccgatcaggtcttcggtaacgggcttagagcggacagacttaggagcgtcgaaagcgttcaggtcgggaacgtaatcaccgcgtgatgtgttgatcggctcggcgccgagaatctcatcgaaaagctcgtcggcggagggcttagagttagctgggcgaggcaggtcgtcgttggcaaggtctgtagccacggcaaggaagcgggacagcggcactgtcacacccaggttatcttggagcttcttctgcgcagacagcacggcggccagggaaatggagatggccacagaagtcaaacgcggcggctcggccacaaccttcttttcgggcacggccggtgcggccggtgcggccggagccgcaatcttgatgttgctcagatcgaggtgggtaagcttggcaagtgtggcggcttggtttgacgggtagttcgcgggaatcttgccgatgtatgcaagcacgtcgcccttcaagagacgacccttggggccggaggctgggatcttggaaacgtcggactcggggatgcccttctcacggaggagctgcgcgacggaggggtagagtggataggcgatattctgggttgtgatagaggtagattgcaggcctggagagtgaaatggatgacgccgttagcccatgtagtaatgcttgttatagcaaataagttccgccgtagcattgagctcagaggaccggctttccgttgcagagatgttgttcgccatgaacatggataggaaactcacgtctgccgacaccgaacaccttcggttgacgtcgagcgaacatggccggaacctgaccgactgtgatcctggctgccattgctatgtgattctgttttggaggattgggagtactgcggtgccgattggggtattcggccggtgtcgcaactcgccgcagacgctagatttggaatgaacgagcagaatcaacgaagagcccaccaccacgttgaagcgcacagatctccaagttcgatttaatttggggtcgtgtgtttggagagacaatccaaagtaaccgttggagctgtggagggcgttgggagctttcaccggcggccaagacgggaacctttttctgccgcctgctgttttggctgttatcggcgaatcccgatgagaacgacagttgaccgattctcgtcctagtaagttacagaatgaacctattcagtcgttgactattcgtccattttcccccggattcatagctgtcaattgactacgtgctatggccttaatcgctttactaacttgaacttccataggctcatcgcagccatgtccgtcagaccacccaccttctcaatattctggcgccaatgcctacaaagtccaatgcgacctggctttcagatgaactcgacatcttccttgcgctacttcaattctagtgcaccccattacaaggtcaagggtgtggccagaactgtcgattccgcgtggcaggccgcaagtccttatgggaacaagaacccccgtgccctggcgaagctgcaagcgaaggtattaaaagccggacaagtgcttttattcaaggcgccttctcatcgcccatatgtcttgactgcgtatggtctgtccgcgttttgcttcgcctattccatctacaactcgaacgcggttctccgggatcccctggttcctattccgatgtggcagaaatctctatttggtggtatctgtatcatgatgagctttggaggcaccttgttcatcctccgaactggctccctagtcagaaatatcaaggcgatcaattccaatggtcgtatgcgcgtcctcttcacagtccgaagcttggttcctttcaagaagccttaccaggtcgaagtggcgccgggtgatctctctttcaagcgcagaatctctgtctctccggaaaccatgaagcattacgaggaaagtaccaaactcggacgtggattaaaaacggagccaaccttgttcacgaggctgcaatctatgcctcgtcgggttttccagagcgtgcggcaacttttcacaaacgaggacttcatcattgtgcaattggcggggcacaagacccatttccgactggactccaatggatacatctcagatgatctcctgcactttgggcgcatggtgaatgtgaagatgccattcagagattgatcgatgatcatatccaagtatcatacccagagggtcgcttcatgtgtcgtatctagttcagtttgtacatcattttggctctgtctcttagatggcgacaccctgtaacactagttaaaagcgcgatttcaatcgagaatccaacaatttatatcattagagtattgcctgtcagaaaacgttgtagcatgcaatgccgcatcactaaatttgggagccacgtgatggccccggcgcgtcctaggtggacgcggttcacccgctatcgcgcccctcacacatcttgcgcacaacttaatctctgcttaaataacagggttcttgaattctcggcgcgttgctccctcagggaagccgctggcaatatgggaaaactcattcgtttggagcttttcagtatgtaccgaccggaaggtgcgcaggcagttgctaactttgttactagacttcaagtcctacaagggacatcatgtcctcctattcggagatgcgtacttcacctcaattattggcccgaatgggtctggcaagtcaaactcgtgagtgcctcctcgcctcagtctaaaggacccaagctaacgcgcgttaggatggatgccatatctttcgttctaggaatcaagtcctctcacctgcgatcgagcaatctccgggatcttgtctaccgtggccgtgttttgcgcacgtctaaagtggacggagaacctgctgctgatggacaggatggcgaggaagaggaagggccagagagcatggatgtggagcaagatgccggtggaaacgacccaaagtccgcttgggtgatggcagtctatgaggatgatgcgggtgaggagcaacaatggcgccgatctattaccagccaaggtgtcagcgaataccgcatcaacaaccgaatcgtgtctgcccaccaatacaacgaggcattggaggaggagaacattctgatcaaagcgcgaaacttccttgtgttccagggtgatgttgaggcgatcgcatcccagtcgcccaaagaccttacccggttgattgagcaaatctctggcagtttggagtataaggtcgaatatgaaaagttcaaggcggaggcggaggaggccgcagagcagcaaaccatccagctcaaccgtcgacgaggcatcaactccgaagtgaagcaataccaggaacagaagcgagaggctgagaactacgcgaaaaaggccgaagaacgcgaccaggccattatcactcatatcctgtggaagctgttccacttccagcggttgatcgacgactccagtgctgatatccagaaataccaaaatgagctcaaagaataccgccgtggcgttgagaaatatgataagaacgtcgaggatgccaagaaggaccatgctcgagtcggcagagatgttggcaaggctgagaaaaacatcacaaaaaaggagagggagattgaagaactcaacaactcacttgtgcctgtggatgagaagatcgacatcaccctgaagaaggttgagagatacgcgtcaaagattactgagatcgaaaaggagcgcacatcacaatccaacaatggcaagcaactagaaaaggacctcaagcttgtcgaaaaagctcagacccaatgggaagttgaatggcagaagaccatgagcaagaagggtggccagctgagcgaagccgatcagcaggagtaccgtaaactcagagaagaagtgaaccgacgttcatcggcggactcgttgaaccttgacaatctgcgacggcagagaaagaccgaagctgaagcagtcaatagcttgaagggcaagtttgagaacactgaatggcaactgaagtcagttgaatccgatgtccagaacatgaacgaacgcaaggcgtctctcaataacaccgtcaagtccacatccaaagagatcgagcataagaagaaggagttgaacgccttgacttccgagcgtttgaaggtctcgcaagtgcgaactgagctcgaggaaaagcttcaggtcgtgttaaggaaacttctcgaggctgatgatggtaagaagcagactgaacgcgaactccgcgccaaggagttgatctcggccttgaagcgcatcttccccggtgtcaaaggccgtgtcagtgatctttgccggccgaagcagaagaaatactccgatgcagtcagcaccgtactaggtcgacactttgacgccattgttgttgataacgagaagaccgcgaaggagtgcattcagcacctacgcgaccaacgcgcaggtcaggccacgttcattcctctggaaactattcaagtcaaggcgttcaactcgaacctgaagggcatgcatcggggcatgcgccctgccattgagactattgactatgatgattcagttgcacgagcaattagttacgcgtgcggcaactctattgtttgtgacgatctggcgacggccaagtacctttgctacgaaagaaatgtggatgcgaaggctgtcaccctcgatggaactgtcatccacaagggtggcctcatgactggtggacgtggtcctcaacagcagaactccaagcgctgggaagattccgaggtcgagaacctgtataaattaaaggagaagctcatgggcgatctcgcgaccctccctaagagtcaccgccgaggctctgaggaagagaccctgcagggcgagctcgtcggtctcgagcagcgcctcatttactctcgtgatgagttgaaggctcttgaaaggaacctcgagagcaagcttagcgagctggacttcgttaagcgccagatggaagaactgcgacccaaatacaccgagcgcaaggaaaaccttgatgagctagacgagacaatcgaaacgtcacaagcttcagttagcactgtcgaggatgagatttaccgcagtttctgcaagcgcctagggtatgatgatattcgagaatatgaagcccagcagggctctatgcaggaagaggccgcacaaaaaaagcttgagttcaccacccagaagagccgaatcgagaaccagctcagctttgagaagcagcgtatccaagcaaccgaagaccgaatcaacggccttaaggcccaatacgagcgtgatcagggcctgattgaagagctacaaagccagcaagaaggaatccgcaaccagctcgatgagttcgaagcggaacttgaactcctccgagaggccctcgagaagcaaaaggaaatctatggacaagcagcagaaaacttggcagagcagcgtcgtgaactccagaagcgtagcaagcacgttgaatcagcgttaaagaatgttaatgcacttgaagcagacattcagagaaactcttccagtcgttacactcttttgcgccgctgcaagcttgaagacattgatattcctttgaccgagtcttccaattcccttgacaaacttccaatagatgaccttgtgcaagcagcagaccctgatgccatggaggtggatgaaggagatggtttggacgagactgctcaggtgcatgattacggtatcgagatcgactttgattctctgggtgagaccctgaaagaggtttgttctcctatccattgcttatttgtcacatactaattcaattccaggaggccgatgacaagctcgaggatgaactgctcgacaaggtccgtgttctcaacagtgaccttgacaagatggcaccgaatgctcgtgccatggagcgcctggagagtgtcgagaacaaacttcgcagcaccgaaaaagatttcgacgacgcccgaaagtctgcacgaaaggccaaggaagagtttgagtccgtgatgaagctgcgatccgacctcttcaacaaggcattcacccatatttctgagcagatcgggcccatttaccgtgaactcacgcgcagtcccaattaccccctgggtggtcaagcgtaggtttcctcaactcccgactttgaataatcgctaacatctcaaagctacctcgatattgaggactcagacgagccatacctggacggcatcaaataccacgccatgccccctctcaaacgtttccgagacatggagcatctctccggtggcgagaagaccatggccgcactcgctctgctattcgccattcactcataccagccgtctccattcttcgtactggacgaggtcgacgcggccctggacaacaccaacgtcgcccgcatcgccaactatatccacgaccacgcctcgccgggcatgcagtttatcgtgattagtctgaaaaccggactgttccagaacagcgaggctctggtcggtatctaccgggaccaggtcgagaacagcagcaaatcgttgacgcttgatgtgagttttaatgtggttcgtatgcgatatggaaatatgctgacaatgattgttccagcttcggaagtacacctagatcggtggtatttatgcggattgtgtgatgaccctttgcttttgctttgcttatttcttcatctttgtagattattgagtcttgctggtttgttttcttcttctatcagtgtcgatcataggagtaggaagcccagtgtctattctgagcacttattcctatcggcaaggctgttaattgataccagttcctgtactgtgtttttcaagtcgttccaatctttctcatacgtcgtacctgcggatagccctaaaaatatccgtttccgaacacttaggtgccgactgttcatacttctacggattccagaaagtggctcgtagaggacttctcgaaagtagatatgaatagattcaattaactccatctaactagatgtgttaaggccaccatgttgaaaacctcctagaagatgctcatggcaaaagataggagagagataccaaggcctcgcaaaaaaatagcaaaaaactgaccacctgtaaaaccacgaaccgactgacttccaccatgtagagaggcacttgttgaaagcaccggcgtgggaagagacaaatcgaagtctcaaaagaagaaaaccgagaagaacaaaaccaagattgagaaccgtgaaccgaaaagacttttcatccgcgagacttgcgacctattggagggaccaccatagcgagaggcaggtagtcatcgaggcctgataagtcagatgccaactagtttgtcgctgtctgtgccacaacctcaatttccttcgcaggcttcaccttgggagtgatcttcatcccagaaacagccttggctagaatagcagccttggcctgggcagcactctttacctgggcggcattcttggcttgggcggcactcttgaattcagcagcagacttaacctgggaagcagtcttggaaggagtagcagtcttgaccccagcagcaggcttaaccggagtagcactcttggccttagcagcagccttggctagaagagcagccttgacctcaggagtgatcttaaccggaggagtagccttggcctgggggataactttggcctggggagtaactttagccttggttccattggcggtggtatgcttggtctgagaagtagtagagtcgacctgagttgctgtcttggtctgaggaatggcctcgggctcagtgacgggctcggcttcggtgggcgtcttaatcccgctggtatcagtgagatcctcggaggacgactcaatatccacgccagaggcacgaacagtctcaggagtagcattaggggaagcttccgaaccagtggtctcggcgacagagacaggcggagacgggttggcttgttcgccctcgccaagtggcttggggacctggttcgggatgctcatgagaatgttgttcacggcatcagggtttttgtgaatgtggaccgtgtgcttgagcttgtccttgaccttgaagtcacagggaatgagacggtaggggagctcctggtcgcgatggtactcgtagagccggactttgtagccacggatgaggatggcccagcatcgttcatctggaagaggggcactgagaagtcggggaacgaactgatcccagtctgcctggactgaaacagaggtgtcgaggacgaccttcacgatggtgtgcagggatctttcatcgccagaggctttcacgacgaagcagttggagtggttattctcctcgtcctcttgccacttgaggacccagccatcgttcgaatcgaaggcgtaagtaaggagagcgctgaccatgatcttgacattctcagcggttgggttagcctcgtaggcgttgatgaattcagcaatagcaggaagcgagagatagtttgtggtctccatgattacgaagttgaaaagcgttgctggtgagcagagattgatgaacctggagaggaaggaagtcgcaggaaggaagtggcaaggactgaggtggaaatgcttaaggtcttggaatcgcaagcgagatcaggaaactgcacgtaacgtgaaagtgggaaagtgtgcgtagaagagtgaattgaggcaaacatttatacttgtagggttagttctacctaccctataaacgcgtgtttgatcaaagaaggcgaattatcaaagcaaacattagtctcccacttgctactgatctgtataacttcatatgtttctatatgtactattacaagtaacatagaactgtgagctaagtgaaaggtcgccgtctacgtccatagatatatatctagatctagtgttagtctgccaatgactccatattctgagcattcaccaggacacaagcagactgaaaagcaaatgaaaggaagccaagagtaagccaggaggaaatatatactgagtagacaggatgatgtctgctgggtccttcctatctgggctgtcgtcgcttccatgggctcggactgagatgacttcagggcttagtaagttgaatgtctactgagtgcactcaggcaaagtgtgcgctacaatagatctcaatacaacaaattattatcttctattgttcaaagtctgctcattgactcattttgtcatctcaccaggccaagcagaatcgtctctgactaccaggttcaagctcggctcatcccaaaataagttacatgagcttcattcacatgtcctctctgggcctcgtagctctagacctcatttgatcaatactagagaggagcaaagatcatacctgaggccagactcaacagaatctgcatatcctcctcactagtctctgactttgtaggtacatggagtggccaagcccaccatcaagctctgagcgactgattctggcgggggatttccgaccgaataagttctcaagaactggtgatcaccaaggcgtgagataccatatgcggattggagacaattgcaggatgtcctgaaagtaatcacagagctgcatatactgcacactcacatatgtacagcgacatgatctatacgatcaggtccgaaggcatccatgactgaatggcgtgcctagtacaaatgacaccgtacgttggaagcatggatgagattcccgttatggcttcctgcctgagaaatccgcaaggcgggatagtggctgactggggcaccggaaacgaaccgatcgcctattattgctcggactcttagccatcagggtgagactactgacattgccttgttcgtatacgaatcggagaatggcaagcccgtgcgacaaagcgatgtcacgattggcaaatactcgggagtcaagggcttaaaattgagaatcctgatcaagttgataggagaagcgacccgctctcgattttgggtgtgttctatcgagtcatgggccccagggtaactggaaagcttgagggccgttcgtatcgagccctacccctgtacctgggttgagaccagcagttcgcaagtgataaagtactggaatcctgccctatacctccagcgacactgtgactggtcagcgtgctgaaccccgactttgtatagtcggctgcatctgcacagacactccttatctatcctccacgctcgaagcggttctaggctctcccttgacaacttaatggagcgctttacacagacggaatccgtgcccactaaggataaaaccaagcttcgacggggtatcgagccaatagctctaatcgcctctccctgggaacccgacgccaagaacggtgagacgaacaacggggtcatcgggtgcagtctacttgggtatagtcaacgccaccggccaaggaactgtgagcccatgttccaagttgcaaatcatgcccagtgtcaacgccccggacacacggagacgacctgagtgagagttccaataatgcaagtctcctgcaccgataccctgctaccgggatttgggcatctgcacccagctagcaatggaaatgggaagtcagcgggagcttcgggtgcattacccgagatttgtgcttgagaacattgcgcaatataagtatactacagcagcgacactcgatattcggttatcgagaaaaaaatatagtgaatatgcaatcgatcgtggtgtaacggtagcagtacatatatattgtgggaacagctggcgtccacgggcggatggatctgctatgcgcataatgtggctattataggggatacattgtacagaataatacacacagcgcacaacagtagagtcgctcgtattgtactgtacgttggatgtcgtatatcgcgccgatcatttcgtctgcggcccgcacataggcaaggggcgcatgtcttttgcacactgaccattcgattctcgtgtggggagtgttgggtgttaccgagttggggccaatgcggctcagaagggaaaaccccgtgtcactgattgcgtggaagtattttgctttttcccatgaggctgcctggcaaacggctggatattcgattctcaagccatcggatgcgtaccaaagacagaaagtataaaaggcggatacctgctgtccctgtcttcaacgggattacagtatactagtccaatgtcacgatcaacccgatctctcgcactataaagtgaaacagtaccgttatattaacagcacggaatatgcggcccgaggcccatcggcgagcatcaaagggcgacggctatattttccgcatttgtaggtggagtcgagcaataagagcgccctaaaaagcaaacacgaacaaaaacaagaaacagacggtggggaagacgaagggaagatcctagctaatcatagccatttccaataattgctggtcgtatacggaaaaagaaacaatgccatgatagttacgcagtagagtgatcaaatccgcaatgatcagcttctttcccgtcctgtcgacactgtcgatccgggagcagggaaccgatcccaatggtagttgactctttcttcttctggataggatggagtccggatacgacaatatcggtgggaatgcttctctagctccgggttgcgacgtccgcgtatgcacgatgccgaacaggagttgaatctgaagactcataatgtgtatttgtagaaaaagaaagaagagaaaaagaaagaagccatcacgaaaataaaaaagaaacaaggttgaccaggataccgtcgggcctggcatccgcgcgtccggaagcagaaaccgacttccgcggacttgaaaataagctcaagattcgatggtcgcgtttaccctcgtatacgaagacattcatggacccctgttgtacatagattaggttgaagggcacggacaatggtggaccaagcgcggtggagatggacattggactgacaggaggaagcgaagagaaggaaagaaagggaagcaatctgcggcgcagctgatgtacggagtagtcgagcgtatccataggagatccatcacgaaggagagattcacctagacccattagtcagtgctttattagcctctcttggcttgcaggagatgatctcagaggcgtccaggatgaccgctcttctttatcacttgtcctgcccagggatcgccgatcggttgatacgattggatggtgatttattgattactctatgtctgcatgtattatttctgattctgataattgggctagagagaagtggtgtatcagacgggaagtatttcagaaatggattgctgcagatggctaagacatcgttagggcagttagggcaagctaagaagttaggtaaatcatttaattgaataatcaaatgatttaaaatagaaattgagacgtccagaggtgtgggccgatctcggatcccccgacagaaccatggatcgaacaaggttatgtgacactcatccatggctcacagccctaagtgtcagtgcgcagaacggactcgacccatcgactacacatcgcaaaggggcagacgcagatgggccaatcacagccgccacaccgaagtgatacggaggctgccctattgccacacgctcgctttcgcagctattcctttttccttgcattagctccacgccgattcgtgcgttcaggagacgtcggggtggagatatgccaatcctcggggtttggcgtcggaaatgggagatcatggatagcccgtattggacttacttggtatatttatctccccttggaccctgcccctgatcgaatggtcccggacttcttatccatcggcaagctgtgttgactcttctattaattgacaccgtggattgctgggcattctgtatatctgtgcacgttaccttgaaaagcgcagcctgacctggattcgacttcaaccgtactatctgattctcaccatggatatgaatcgatatccagttcccgaagaggtcttggagagaagacactctgatacgtgcatcccacaccagcatatgaacatggtaatagaactattgcaaaccaaggcacatcagtgggctaacaaccaatagccgatcactcctaaacagccccataccgaatatacacacccacacttcgccatgatatacctcgaccacaacggtcaatggcaactacaagcctcgccctcaattgcaggctgcgaaggcgccatcttcactcaagatgttacagaccgattcatagaaatgactggccagacgccccaaaccagtccgcagttcccaagtgagtcagattccatccaagttccagaacgacgctgacatcctctccttgcagacccgacccaagcaccccactccccttgggacgagcaacctgcttcgggatgggccccgcctcaggcgcgacaggccgagatgatcccgttccaatggtcatcacagcaaagccgaaaaaagtcgaggcgtgccggcggtacgcccaagtctcgaccgaaatctacctcgccgccgcctgtcgctccggctcccgggcggacggtccttcgtgtcgggaaccgggcgctgctgcgacggtactatgagaaggcatttgaggatttccagcagctcaactgccgggcgattgcgaaatcctatattaagcttgtcgagccgaggaagcaggtccactacccgtataacgggcgcagggtgattgccggtgtctcgcagcgtgttgacccggagttcacgaagcctgcgtggtggcctgctggtgtcttgcacaaagagcctgatcatctgctcaaacctggtgagcatatcctagtatcacgatatgaaccagattaatactgactgaccatagatcgtctgcgacttctggttcatatcctttgtgaactaaaggatagccacggagtcacaacggataagctgcgagaagctggccaagacgtcagacggcagatcacacctgcccaccggctgcaggttctcgacgagatctactttgtgcgccaaatggaagaacaatatctggatggtgaaatcggtatgtatccctatcccggcaagattcaatctacagttcactgacatgtactatagacgccagcaccttgattcagataacacagacacatctacccgaagcaatcttcccagacgatgacctatcatctcgtgcacacgcagcacccgtaacagccccttccatcgaggccgaacataacatgcacgacgcccgcgacaaccctgttatctccacgctggaagacgatgacccaaagctgcaccactcgcatagtctgcccctatcacccactactagcgagtccagtggtccacacagcccaactggcagtttcggctacccaatagccatagcaccctccgtgcatgtaataccccctctcgagtcccccaatgtcacaaagtctatacatccagacccgagttatctgtcggggtactactcgcagcaattcgtgtctgataaagcgcctgggttttggccacatgccaatactgcctcgcagtatggctattgatgttctgtttctcttgttttccagtacataactggagtttgagcgtttggctggacacggatcttgggtttcattggttacttttccatatatatattttcttaggatggtttgttaattagcttccatatacgagaagtcagggagaatgcaaattaatggacaacctgatctctcgtagagtcgaccttatgaattagctgcctcaggagtcaggcgacacctgggccaagacggctcgctgattgggtccgcgtgacgatcccctagcgcagctcctccatccaaccaccactcacatcgccagcacacgtcaattcctcaccttctcgctggctcttgactgtgtgtttctccaaccttttggcctgcaccaaagcatcagaagccctacatcgccgtttccgtgccatgcgccagtaagcccgcagttgtttacttcttggatcgccaaccacagtccgccatccgcgccctccgactccaacacacgcgtgatctaccgataaggtaactttgccgtctctttggatgattacccctcatatctatataatggccgtgtcgttcggcacttgtgtctgtttggcacatctaaaaagtgcttttgaagcttgcaactatggggatgctaactttcaatcggttcctcagtcgaccgtatcccaacacccgggacggaccgacaatactctgcttccagcaacagtttctaatggaaagcaccggctcgaggagaaaatccgataccatgtcggccgagcctccggtctccacgccagtcgtggaggatgtgtcttcagatgactccgacaacgatgaatccgactctcctgccataaccccaggaaccctgtcgcgcaacggctccttctcaaacagcagctcgtacctagaagactgggagtcatttccaccgctggacaagctgactattttcgacctcctcgacaacatccacctctcacagcgtctggagacttggcagcagaccctcgccgcgcaaagggagaaggtgcgcaagcagcgggagaagctgaggttgtcgtccttgaatgccaaggaccgtgttatgggtgaatggaagcgccatgcaccgaccgccgaggagaagctggagaaatatcgtgctcggatgaagcatggcgttgagcgtctcggcaagcggtggagccagacggcgactgtcaccctccgggagaagatgtcgtttattgctggtgtgctcaatatcttcatcagcggctacctgatcggtgcttgcccggagtacttttactactggtttagcggccagctggcttttttcatgcccatccgctactttacataccatgctaaaggctaccactacttcttggccgatctctgctactttgtcaatttgctctgcatgctgagtatttgggtcttcccgaactcgaaacggcttttcattagcacgttctgcttgactttcggaaacaatgcggttgcaatcgccatgtggcggaactcgatggtgttccacagtatggacaaggtcgtcaggtacgttacacatcgaaaggaacaagttcatcgctcatcttatctagtctcttcatccatattatgccacccgtgactctgcactgcatcgtacacctgactccggttgcgatactcaaggaacgcttccctgctgtctacgacatcaagttcagtaagcccggggacccagagcattatggtcttggtgccatgatcctctggtccacggccccctatgtggtgtggcagctcatgtaccacttcctgattaccgtgcgccgccgcgaccaaatcgcagcgggtcgtccgaccagcttcacctggctgcgcaagtcatactccaaagcgtggattgggcggtttgtgctgagtctacccgagacgctgcaagagccatgctttatggtgatccagtacgcgtacgctttgtccaccatgctcccctgtccgatctggttctggtacaaatgggccagcggtctgttcatgtctgcgctattcgtctggagcatccacaatggagcgacctactacatcgacgtctttggaaggcgcttccaaaaggagctggaacagcttaggacagatatggctcgttggcagaactctcccgaaggatcaactagtcctatccttatccctgagcccagccctctcagtgaagccatcaatgcacacagcgaggagaagcgatctagcgttgatcgaatccctttgttggaaactgccgatgtctcctctactgatataccggagaaagacaacaaggattctgttgttcgagagcgaatttgaacattacgagataccatgttgacatcgttatgccagtctttatataccctttgttggttcttgtcaagattcatgagcctgaattgagcgagtcggtttatagatgtacacgttattagattgaatgaatgttatgaaaatacttctccgtcggtccgttctcgaactgtccgggatctctttaaccccgagcaaaacccgaggcggtctcggccgtcacgtgccagatgactgcggcagtacatcacaacatctcgtcggatccggttccaggacattccaaacttgtgaccgacattttattactgagattttttttttggatcatcctctggacattaagattaatcattaatttcattattgttgccctataaaccccctgttcgctcgttgcttcgtgcaccaactttttcaccgtttcccgcaaatgtccgctacaatgagatcaaccggattagtccgcggaacacctgctttccggtctgcactaatcggtaagtgacgagtccagaaataaatggaaatgccagttgctgatacttcccagcaggccgtagtcgttccagtgcattgagcccggcctccattgcagcccgcagccttctacgaaatggccgcgatctgccatcccagatctcggccctggccatcctgatcccgcagcgtggatatgcgacggagccaacccagtccaccaactcttctcagaactaccctccccccgggttcaatgccgagcaggccaagaagccgctcccccaggaacagaccacgcagccacaatcgacggtggcgaagacccccgagacacaggcggctgctaagccggctgcctctggagaggttgcgaagacgagcgtggaggagcagaagttggctgagaagaagagcgcgaaaaagttgacgtttggacagaaggtcaagaaggagttgcagcattactgggatggtacgaagttgctttccacggaggttaagattagttcgaggctggcgttgaagatggccggtggttatgagctgagtcgtcgagagcaccgccaggtatgcgccactacaatatttcgatttgacgattggctaactgagtttgattagctccaacgtactacaaaggatctgggacgtttggttccgttttcgatgttcctcatcgtaccatttgccgaactcctcctccccgtcgccttgaagctcttccccaacatgctccccagcacatacgaggggcagaaggcccgtgatgccaaggcattgaacctcagatcgacccgcaaagaagtttcggcatttctacgcaacaccattggcgagactggtctgcctttgaccgcagccactgtcaagaaccacgaattcacagacttcttccgcaagattcgcaccaccggcgaatcgccctcgaccgaggatgtcatcaaggtgtgcaagatcttcaaggacgatctgacccttgacaacttgtcccgaccccagctggtcggcatttgccgttacatgaacctgaactctttcggtaccgacgccatgctccgatacactattcgccaccgtatgcgccagatcaagcgtgacgaccgcgcgatcttctacgagggcgttgattccctctccgtccccgaactgcagatggccggcgcctcgcgcggtatccgcacacacggtgtctcccccgcgcgcctgcgcgaggatctcaccatgtggctcgagctgcgtctcaagcagggtgtcccctcgactctgctggtcttgagtaacgcctacctatacacacagggcaaggagaccgagttctcgtcgcaagtcgacgcgctcaagtctgtgctctctagtattcccgaggagctgttccacgagatcgaactcgaggtgcacaatgccgagggcgctgctaccaacaagcagcgtctggaggttatcaaggagcaggaggagctgatctcggaggagaacgagcagaacagcaagaatgaggtcaagggcgtttccgtacctaaggataccgaggatatcgacgagaaggaggagactaaggtccagcctccggtcgatggtgataagcagtctgctgaggccaaggatgctttagcggagggtgagcgcgccgagaagacctcggaggccaaggatgcgaagaagagcgaaagcgtgtagttatattgtttgatttatcttggattgtacttgtcatatagatttcctttactttggccctcatttggttttcttcccttcggttctctcctgtgttatttatttcgtgttgatagaccatttgatccccgcctctcccttattatgttcctgtatactctattgactcccatatctctaatacaactacatccgtggataaatcaaccgtaacacttgaagtactctccggatttatatcattagtcaccgacattccaaattacctcggctacaaaccccatcttcccagtatacaacctggccacggagtactccgtccatatctcggtccaacaaacccatttgaaatgctctcacgaccacagcgcaaccttctccaaagacttcgtttcagccacgcttaccaaagcccaacccaaaaccagcccaaatcatccatgcactccaaccccaaccccaaccccgaaccccgagcatccaaaataatgccgcccctaaatccaacctcgcaggtatgtgtaacttgttctctgcagctacccgaaaggaccgcgtgtcctgtgggattccgaatctgaatctgctgtatccattttgccatgcgcccctacgatcatgtatccctgcgggtgttccccctgcttcttttccccctgagccacggggggtgtgtcttaaattgccatgtttcttttctttttttttcctgcgacgatcatacctggatgtgttattatccagggagcggttcggtctcggggctatgggcgtttgagtttcggcttccagtcttacgtgtgttgggacctgtttgaattaggcaggagatgagatgagatgagatgagatggaatattcttttctttgattgtctgagacaaggttcttcacggtccagccgagacttgaccgttcgatttctttttccccgtggatggacatcccgatgttaaacgcaaccacagtatagaaaggaggaaagaaggaatgctgatatttacttgcacatgtatcaggaggcaatcgccagacttcgaaattacatccctccgccaacaacgtactactcggtcccggtaagcagacgggcggcagtgctgctactgctcttcgccgacgccaagggcgatcttagggtggtggttacgatccgggctaagacactaagttcgtgtgagtgaccagaacttagaaaatacgtggatcagccctgttcccaggctgcatgacatgggttggttgttcgggactaggctaatgatattcgggtctacggagtagacgcgggagatgctgcattgccaggtggtaagtttgacagctccagactctgcaaggcaaaggcaaaagagaaaggaataaaaaaaagaataaattcctcgcttaaaataaactaaccccttcttcaccggagtaggccgagcagaaaatacagaatccgccttccaaacggcgcggcgcgaggcatgtgaggagatcggcctccccgacattcaggaaagggaaaagcttccacccccgttcagcgtggagcatctctgcgagttcccggcaaatcttgcccgaacggaggtggtggttcgtccctgcgttgcgctcctccacagttatgatgcgggcttggggctgaaatctaatcctgaggtgtcacttattcctattctggacacgagagaggttgaggttgtttttacggcgccgttccaggactttctgcgcggacatggagagaatggggaggactggtatcgtgggtcttgggggatgtggcataattcgcaatggagaagtaagtggcctccccctatgttgatgtatgtgttgtgtctgttttgtgtgtgggattgccaagtggaggacgtcccaaataggaaatagcctggagactaactacgccactagtgcatcagttctttgttcccagagcagaccaagtctaccgtatctttggcatgactgcacgcattatcgtcgacgcagcccgggtcgcatacgcgcaggaaccggaattcgaacataacagtcattttggcgacgaggccatgatcgccgacctgcgccagttgggccggttaggtgaaaaggccaaagtttaggagaaggactgtgcagatagacatgccaataagaagtatataaataagacggccaatcagacgagggcgtaagcggatcaagggcgatcaagtccttgcgtcagttcgtttgacgatgtctgtttgttaataagattaggcgttaagggtctgttagttataagccctgatctctccttgcatcggatatcattcataacttcactcttcgtctttctttgttacacctacttatttccatttctttgatgcgtatttgattgttcgacattcgacatttccaaatgccaaccttgtacacccgaatggctccccccgttcgaccatctcgctcactcgaaggactcgagcgagtaatcccaccactgtcaccccaacctcccttctcaaatcgctccgatctcttcctcaacaaacccctccccgcaaaacccctggacccagaatgttcggcgatgtggagtgactccgacagcgacaccgaaagcaccctcgacagcatcaccagcgaaccccgccactccgcagacagctatcccatcggcatcttcgtcagttccggctccgactttgacgacttgggcgatcacccgcctccagccgatcagctcctgagactatccccacagcctccacataaacgcacggactcgatcgatatcaatatccccgagccgtcagtctcagtatcgtcttcgttttcgtcccagtacggacggccctcgaactggagccagaaccgcacgggcacgaatcactacttccgcgagaaaaagtgggattatttcccggaactcgcgccctccgctgtccaagcaagtggccgcatcagcccaaacatgaacaataaatcccgcaaaatcggaaacccgctggaattcgccaagggcaagtaccgctggcactcgctcgaccgcggcggtctcgtcggagtgcgtgactcgatcaagacgtacgtgcaccgcactctctcgcgcgactcgacagagaataaaccaaaggaaattacccgtccggcgacggcgcctatggaccaccatcttaatgatgtaggcggtgcgctcggtaacacaccgcagcaatctactttagctttggttttggacacgcaggccgcgctgcgagccccgtccgtcgcaacgtccagcagcagcgactacgactataccaaccacagattccatcttcagacaccgacctcgcctacttcgctttcatccccgacaacgccacggcagaaacagctcgccgtgccgctatccgcgtaccagaaacacgggcccgtgatctgggacgcgcccaagaagactaagaagcgcaatgttcagttcccgagatacaagtccccgcctggatccgtggcagagccttcttcgtcttcggctcccgatttgtcttactctaatgctacgctggcttcgcggaagtcgcagaacaatacccggggcgtgttcctgaaacgaattggggagtccaaggatgatcgcaggagggagcagttgaaggcgcagatcaagttggttgggcctgttaatccgcatacttatgtgcaggctgatccgtgggtttgattgtgtttcttgttttgtttttgttcttcagcactactctcatgacttctcacgacatctatacctatctataccctcttcacttatgtctttgttcttgtttttactgcatattctgtcttgttctgtggcttcagttgtaccttgttattattagattttctaaatatttccaaacaagtacttctagctcaacttggtgtaagccatgactcttggaaatcagtttcaatcataccattccacctcatttagatactcaactgcgtcgtaaactcaataatcaattaaacttctctgcacaacacctaatcacctctacagacgctagtttcttacatgcacatccataccgcacaggtgcatacagccaacaaaccaacgtagatcgccactgtcaggcaactccagtcatatttgagatacacccgccttgacaccactctactccgcacttagtcaaagccacgtctgccattatccttgtattatatattccaattggttcatctcagggcaagggttcctactgcctgcaatgcaatccaagaaattaaattaaatgaggggtaaaccagggcctgaactctcttaccaactcgcactgagatatttcctgagtgtaaccaaccctcgtgttggcaagcagttctccgcacaactagcggtgggtgtgtagatgagctgttcgttggggaatagccctatcattattattgtgcggaatgtggatgtccactatatcgggtgtcatcaccgacttttagaattgtaagttgctcggcctaattactctaaggggagttgggccggtctattgtagaaaccaattaatgagaataatactgaataatatccatgctgtaggacatgagatacgttgatcaaccccactttgcatttgggctaagcgttgggctggctatgtacttcgctacatgaagaaacgaaggatatgtgcgtatccgagctgtcgtcgggtcggtgatgggtcggaattcgacgaagatctagatgtcggatcggatgtgttgactttgtgttcatcttggcttggacaggtcgaccttctcaagttctatgttccaaggttaatatggtggcttactgtgggtatccttggaataataagatcgcacctatctcaattctagaagcgacttgtatctatcatgacgaggtcgctcatcccgatctgtattttggcctctgtggcggtatgctggtagaaagggccgctagcagagtctagagctatgagcattccatggtgacgatttgatatagtttagggctttgtggatggtcgctatcaggattaacagtcagcttctatacttcacggtatagaacttggataacctgaatatcaagttggttaacactgttctatcgcttgtataatcagatttccagaacaatggcttttttcagccgcaaactaatgtacaaactactttttcattgttattgcggtcactttcaacaggacgtcaagactagaagacagaggataatcatggaagtaattcaatgtgccatctcttgtatccatattctagtccggagtcagacaaactataccacagcgactcattcatccaacatacaaagggttttacaccaattacaatcaactgatgactgcacatagactcaagatctccacttgaggcaacaatgagatccctccaagcggagtcgccgctgacctaaggtgcggccccgttttcttctagtatacgtggacctcatacacggcgacctagtatacggcgacctaatatacagcgacctagtatacgcggaccaacctgggtatataagtcggagacttccccacgtcagacgatctttctaccaacctacaccgctgcagtcatccctgactgcagtcaatgtcagacatggtgacatgtcctgaccatggaaaggacctgtgaaggtctcttcatgtggaatctcaggcattgcctggacttgggcttgttctttttgatgtgcctttcccggtaagtgaaatatgctttgttctctcttgttgtgtcagtcgctaatatgtatatgggtaggccactgagaattttggtcgctcgtctcaagggcgatattgatgagtcctttgaaatgacggggcagatgaagagcgtcctgaccatggaaaggacctgtgaaaaggtctattcatgtggaatctcaggcattgcctgaacttggccttgctctctttgatgtgctttcccggtatgcactatgctttttctctcttgttgtgtcagtcgctaataggtatacgggtaggtcacctttgagattttttggatgctcatccaaagggtgatatcgacgagcagttcgcaacgatggggcagatgatgagtgtcctgaccctcggaaatgacctgtaaaggtctactcatgaggaatctctggcatggtgccctggttttgcgtgttttgtttttgatgtgccttgcctggtacgtgaactatactttctctcttgatgtgtgtgtcgctaatgggtatacgggcaggtcctttctaagagccatttaacactctcccaaagggtgatatcacccagagcattttgccatgacggagcctgtgctggaacaatttcaggcaccggcttaatgatcgagtgactgtctaaagctcatcaaatccgtgcactcggatacaatgagaacctcgggcagactggtttgatgtcgtcgaaaagataaagcatctatcgacatagaaaacgacggatgagacctcttggtcagtggtggagcatgtgggtcgatgagcgtgagtaactcgagatacacttgtcaggtcgtggaaagatccctatactaaccaaaagtctagtccgcaatgcgagcttctcgtgcgtttccctgcaagggacgctcaagaaggtcccggtcgattgtgttggagtttatcaagctgccgcaaggccttcgcttgctcttctgccctacagaagatttcttgtcttggattcgaaatgtctccaagaccaaaggcaaaggcaagatggccggggggggggagaacggagggcgttgatagggtgggggttggnnnnnnnnnnnnnnnnnnnnnnnnnnnnnnnnnnnnnnnnnnnnnnnnnnnnnnnnnnnnnnnnnnnnnnnnnnnnnnnnnnnnnnnnnnnnnnnnnnnnnnnnnnnnnnnnnnnnnnnnnnnnnnnnnnnnnnnnnnnnnnnnnnnnnnnnnnnnnnnnnnnnnnnnnnnnnnnnnnnnnnnnnnnnnnnnnnnnngttgatatggtcggggttgggggggttgaatcggccgatgcggccgtggctgccgacgtcttccattgccccgaccccggccctagcaactcaagagaaggatcttttggaagtggaattttgagctatgtttcttgttgcaatcaccgactgagaactggcccatgtcggtggcctggttcctttttctcgcgcgggccatgagcctgctgctcgtgtacctgaaacatggtatgaggtgctgaattcctggggaagcgttgatagagggaggtgtgtctcccatctcataatctcaatacggagagttcccacggggaggcatcacttcggaaaaatcacaagttccttgatatcaaagcaatcaaagcaatcaaagcaatcaaagcacattgaaagccgtcctaagacaacaattggaacgtcaagtatagaccgaattccgctcttcaagcctaggttaaagtctttgctcatttcttctttctatctgataccccaggaagagagagagctgtgtcaggtcgcattggagagatgtcagtttggcggaagtcgagcaccatcaattccgatagctaggagagataaatcacgggcacagcgcaagaactcgactaagatgccttgagaataaagaagtagatgttgtactccgtgttgtatagttgacgatcgaatgccaaggaaacatcagagccccgccattcaccgaagattcaccttcggagtatggacaccttcggggtatggactcttgtcatgactcattgctccgatctgcttcaagtctgagttctttcgttacctttgtgcgcttcgtttactgcactctagactcctactcctctcggcatcatggcgcaagaatcctcgcaagtcgcgccccgctacctgaccggcgataaggccggcctccaggaattcctagccagattcgatgtgagcacacgttttggatctaccgatgtactagagagtcctgttactaaccagattctgtacaggtattcctcttcgactgtgatggtctgtcccctctgtatcggccgaagctccccgcagcgctgaacgcgtcgcaacaaccgctgagacaataatatttaggcgtcttatggtccggcgaccacctcttccccggaacagtagagacactggagcttctccgaaagaatggtgcgcattaaataccaagtgcgcaaacagaggttaataatccccagggaagcaaatcgttttcgtgacgaataacagcaccaagtcgcgcgcagactaccgcaagaaactcgaaggcttagggatccctagtacagtggtcagtgataccaccgattaatcacctcacccagtggcagcgactcacaaccaaacaggaagagatcttctcctcctcatacagcgcctctatatacatttcgcgcatcctccaactccccgaaaacaagcgcaaagtctacgtgatcggcgagacaggcatcgagcaagagctccgctccgagaatgtccctttcatcggcggcacagaccctgcctaccgccgcgacgtcacgtcagaggactacaacaagatcgcggcgggcgatgagtccgtcctagacccggaggttggtgtcgtgcttgtcggtctcgacttccacgtgaattacctcaagatcgcgctggcataccactacatcaagcgcggagcgatcttcctcgccacgaacgtcgactccacccttccgcactcagggtcttttttccctggcgctggctccatgagcgcgccgctgataatgatgctgaatcaggaaccggtcgctctcggaaaacccagtcaggctatgatggattccatcgagggtaagttcaagtttgatcgtagccggacttgcatggttggtgaccgtgtgaataccgatattcgctttggacttgagggtaaacttggcggtacgctgggtgtcttgactggtgtctcttctgaggaggagttcgtgtctggggatgtcaggcctcatgcttacttggatgcgctttctgatctactagcctcggagggggcctgaaagatttgtattataacaaatgttgtatttagagatagacatacgaacacaatgattcacccatagaatatctgtagccagggctatcctatcgagtttcgcttcttccatgacaaaatgtcttcatacgggtatgtgtactacaagtaataccaaacaagtcccctcgtagatcggaaatatcaatttaccctcggcaattctccccactcaatgatgtccagttccacagctccggggcgatggacctcgggagttatattcaggcattggaagccctaattagttcactaagagctttccaaagttgataattaactataactaccagcttattaaaaaggataaggaagtcccctaaatccaaaggtcgggtttattctacaattcgataaagtccaggtctctgttcatgcgcctttcagggcttaattgttgcttccatctcgcatcctatacctccagccttcggtgaccggcaaaaataaccctatcggatggcctactgcatagagatgtcaccatccctatcgggaagagcgctagctagtgcagtaacaaggattccctgtatcggtttagctgtgatgtaagagattctcctagaatcaatactcacgatgtcgatctgttcaagaaggttcattgggtcgatagtatggtccttaagggtagtgtcagtaatgaatcaaaatagttcagctgggggatcttgtacgcggcagagtgtctcgacggcggatttccaaagagcgaatagtggacaacgccgctgaaggtgtctggggtcgtggcagaggtaacaggccggtgtgatggcgatgctgctctgtgacatactctttatttgttagttgttggtctaaaagggtttgttctcagactggttatagatatgagagtggcatggtggagtatgacttacctgatgctggtgttggccttggtgttgatactgttgttgtaggtttcggtgatactgttgtctatcgtcatgaccagctccttgggtagctctaccagcacgattggggtcacgactagctccctggtgttgtctgacagggcgtgtagagtccatatcaagatgagcgagaatataagtcttgaagtcgcagaatatgttgaggatcaagacttgggaatttcagattcttgaccaaagatgagagttggtaggagatacgaagtagaacggcaaactccttcatggttggttaagcagagtaagagggagttgagctcctctcccctaaccgcctcctatgcttctcctacctcctttttgtttgacgcctgtatttggatcttgctttattgctggtaaaacgaaagaaaggtctgggataaggctacaatcgttgtttgatttaggggactttacttcacgctatttccaagtctatattgttatttactggcgccagctcatcgacgtcctagtcttcagtcaaatcattgaatcagaagcgtgtctaccccctattcaccagaaaagctcaagacgcagtcatgtacatgattactagctatgcgtgtgcataaattactcgtcaagtagttcagactcactcggtacttagtagttcacagaaaagcaccgtgaaagggtatcatgatcattccattcgaacaagatctgagtgctaaaaaaccgaatataacgcctcaaacatgtaggcgtccttgtcctgaacgccttttttccgatcaaatattcggagtctcactgctgaccataagggtcaagggttggggaaaccgcctctagtttccacgcagaactccagcgatgcgtaatgctaggtccaacatggagagatgctcgtcggatccatcaaccagtcgcttgtcgacctctgagaagagcatgacaatcttgtttttctgaatatcgggaattgcctcgttgaacactacacggcggtataactagaaaggtcagcaaaggtatggggaacacccaggaagaagacaaacctgtccaaccagctgcgtagcactccagccatcagccacaatatccgtaatcacccccgagacagcctcgtaggccgacgcaccactcgtaggctgcatagcctcgacaagagaatccaaaacatcatccggcagcaccccggcgatttcctcaatgctgttaaccgtaataacactagaattactacccacatccgtcatctccgcatcatcatcggcatccttcacagcaggcggcttcgtaggaccgaccaagcgcgccgcgctctgcagatacgtgatggcacgacgcaaatcaccctcgccacaccggataagcgtatcaacaactccatcctcaagctgcaagccctcctgctctgcgatattcgagatccgctcaccagcagcgctattatccagcatcttgaaccggaacttgctgcaacgactggcgagcggctcgatgatgcgcgtgacgtagttgcagacaagacagaaacgtgtgatccgactgtatgtctccatcgtgcggcgcaaagcggactgtgcgtcttgcgtcatgctgtctgcctcgtcgaggatgatgatcttgaatggtggacatgggtactgtgcgcggtaggcggcgtccaggcctgttggttgggagagctgggctcgcgcgaaattcttcactttgtcacggacgatgccgataccgcgctcgtcggaggcgttgagttcgaggattcgggagcggtaaagggcgggcccgaagagggatttggcgagggcgaggattgtggatgtttttcctgtgccggggggtccgtagaagagcatatgggggagctgcgagtgttattttattgcttcaattgttcggggcgggtggtttacgtttgaagcttgcagagtgcgccgcaagactttggtcgtgtggtcttgcgcagcaacatcatccagggtcttggggcgactaattgatattagccaatgctgggtaagctggaatagagcattgacttactatttctcaacccacggctggagtttagttgagtcttccttgttgtcgccagccttgagcttagagctgctggatgctgcggcggcagcggcacgagccttattattgaaaaaagaggcagccattgttgttgaatagccgaaattaacaaggcaggttatctcgagagctgctctgcgatgtgttggagtctttctgacgccctccacaatcaagacgcgtctccacgtgacacgcgcagcacttaaacactagccaatgagagcagctcactgtctgagtatacttcaacctatcgccagcgttaatgctggtcttatagactacggggatcaacattgcgagggtcatgattgcatggtatctcattaatgcttgtatcaatatttatagcttatagctcgtctcgcaccggctcctccatcccagcctcgaacatcctcttttttgtattccggggaagctttgcttgtcttgccctctcctccggggtgacgtcgtcaatgtctacgcttttttgtctctcttgctcgaccatatcgccaattttatcaattacacgattgctgtcgatgggtgcggtcggctcttgctcccaggcggtgctactggctgtcacggttcctgttgtagccgccgtggccatttgatggatagccgtagagacgtcccttgagatggattgagaagcagactgcacagctgtagtggatagcccggctgcacctgttgcaaacgcaagccgagcaaagagcttcaaaggctgccatacgagccaccaaagaggcccataaaagacacgtcggaataggagccagccaattgtcgcaagaaggatatagaaagcagtctcaaggtaccatgtgtcggacttttgggaacggagaagagagttcgctagactgcgagttgaagagagaagtgtatcaaggctgctataggactcagacagagaggagatcgcggctgtggattgttctgattaagaatattagcgtctggtaggataaggaaatggatagatgtacttaccaagagttgattgggcaaaatggctacgggagagctccgcctgcatgagttgatgggttctgcgtagcgcagatgtcacatcgttcgaggcgttcaaaacaagatcatcctgggtgaacttctctgacggcttcttcttttcggaagagtacgatctcgacagcagcaaatctctctccttccgcctggcgagttcggcattccgcttcgcttgtaattgggcggttcggaaatcacctcgtgttctgaagggccgattagcacatgctacatatttcaagactagccagtggactatgacaaggaatctcgccggcatgcgcagtcgttgaagggtatcttacctcttgagatcctcagccaatcgccctgccatagaaacaacccgctctttctcaacctccttctgtccatgcacagcagatgacttgcgcctgctatctgagccagtttccagcgcttcaacctccacacgcagcagctccaactcttgttcggcttccttcagccgagaatgtatctcacccccaagctccagacgtgcttcatctccctgtccaatagaagcagtaaaatcgcgcagtcgatccacgaggggctggatttgtcctagggaagccgagagctctttcacgcggccctggagagctgtcgtggaggacatgttgttatagacgcatccaagtgctgtttgttcggggagtagaaggggtgtctctgaaaatagacacaagtgtagaataaaccgagagattcaaaacaataagttgcttcataagtgtcgagttgttcaactcaagagttgccagcgtcattaggcgttgtgtttgcatccgagtcaaacatgccccatttcctccaaccgcaattcgcaacggcctccgatgtggtgagaacttccaattgaccttgcgccattacctatcagacttgtcgcagaccgactagggtccaagcaattttctccttggatcaatcttccaccgagggtcatttgtccaactgctgcgtaatctactgcagaaacaccacctttaaaaaacttcccgccaaccctcatccactcaggtacgcaacaacggaaccaagacggagctataggatatcattcgctcttgaaagattcaaactgatcaatttaccagtccacaaaagtctctctcccactcaccactcaaccgcaacaatgggcatccccatcgccacgataaccaccttccggaccgcctacaaccccttctcccgcgctgcccggccatgccgcctcttcctaggcatgctgcgcacaccagacactatcccaaccagcagcccgacgcacattgatatcaaggtcaagcaattgccgcgcaactccaccgagtcaccgaccatgactatcgggttcaagggcggcaaggaacttacgctggatgtcggaaagcgcgggctgaagattggcgatgttattgaggaggtgtctcgtgttggccgagctctgcagcgtgaggccagcttgaagaactaagagattttgttgttcgagcttgtattcgtgtattatattacctatcattttcatctaacgattttggcgctgttggcgctgttgggcatgtggaatacttgaattattgttggtaaaaaccataagatgttcatgcttctacctgatactaggattactggagtggatttgatcttgcacaaactgatcctgaaagtgattgtttcattgctatccagttgaatttgcatttgcccagagattactcttctctacactgtagtaagaatttgaatactgagagcgattcattgacagttcagaaatgggtcttttcctcggaaaatcgaagaatgcacttcccatcaggcgtaagatcataggcttggaagttttgtgttagttttataggtctctttcagagaatatcatttatactgcggcacctgagatgaagaaccacttgtcaatgcttccatcaatgggagcaggggggaggttctcgttgcgggggatggcagcgagctgggcctggtcaacacggtcgggagagttctcgacggtggtgttggcactgtgcaggttagcttcaaatcctcaaaataggatacatgcatgtagaactcacaggctgatatcgccacggggggtcttgccagtgacaagcttctcccaggcatcggagcactcgcggatgacatcctcggcgtacttcttgttcttgcactcgccggagaaggcgaactggttctcgggctttccgtcggggatcttgtaaatgcggaaccactcgttggtggcgcgcatgagaccaggaagctggcgctcgacatcctcgatgtcgttgagcttgggagcaagagggtcgttgacgtcgatgacaatgatcttccagtcggtctcctcctcgtcaatcagggccatgacgccgagaaccttgacctgcttgacctggccggtgtagccgacaagctcaccaatctcgcaaacgtcgaggggatcgttgtcacccttggccttggtctcggggtggatggagttggggtcctcccaagtctggtagataacgtcagttttctgcccctcttcttacccacgggtgtgggaggaaggttcgaagcttacgcgagggaaggcaccgtagttccagaggtaacccttgtgagggaagcagttgcggacgaagcggagcttgcccttcttggtgtcctgcttgatggggttgaggaaatcatccttggagatctgtgttgatgcgatcagtataaagctgaggtcaattgcgggactgtgtgtcgtacctcctgcttggcgttggtccagcgggggatctcaacgaccatgttcaggatggtttgctgctcgttggcgtagagaggaatgtcgtggaagggagaaacggggacgccatccttctcaacgaacacgcggtgctcgagagtgtatggggtaccgatcttgcggatggagtaagtcatgttgggcgaggtagacgaaatgtgtcgagatacttgtgccacacgggataagggagaagaaaaggaagaggaagagagaggggcagcagaagtggggggagccagcgctgctgatgtgcgccaaacacggcgggaggcggtggaggtggcacttcccagtcgggccaagggaggacaagtcattggctgtgttggaaagctctggatgccgtgtttgtttgatttagtatttcagatacagaacttgaaattgaatgttataatctcaatcaaagggtatagctgcaatgcgtggcggtgttaccccttgtcggaggtttgtatggggaaaaattaaacatggcagttccgaaactcggcttcttgtggtcaccccgactttgatatcccgactggaccaggccaatgtggatgtctattgtatacaattgactctatgcggtgagacgtacatagcatacatgtacgctatatcttttagctatttgacagatgtatgttgtacaccgcatgtacatacccgaccccatactatgacgccgatatcggcagtatacgtacgcctatgttgtctagatcaatcgcttattcagtccaattgtattccttcaactgtagaatattaacaatagaggcatcttgggatcacaaccttggaagtcatgtcgtgatccttggctgggaacagagcccaatgattggctgctttagctcagcttgaaaaataccagaataaagtaaattacatcaatacgtgaaatccaatgacaaccctcatttaaaaaacagttatcgccactatcttcacgtgactcgagctttccatcgcgagtcaccccaggaaaaaaaaagccgctctatactccgctctccccgcacacagcatatgggaatgctatgatcggaattttccgcaaaacaatgacaactctcgcaaccgcagctacaaccgcccccgcgtcggccgttgtgccgcgcgtgtccatccctaccaacggcgtcgactaccgcaacaaaatcgtcctcgctccaatggtccgctcaggcgaactaccctcacgcctcctagcactgaaatacggcgccgacctcgtctggggcccggaaacaatcgaccgcgcgatgattggcgccgagcgacgtgtgaacccacgaaacggcaccatcgaattcacccgcatgcccagcaacggcggccgccctaacaaatcactcaaagaatcagtcatctaccgcattgacccggcgcgcgaaaagggacgactagtctaccaaatcggcacggccagcccggagctagcagtgcaggcggcgcgcgtcgtggccgccgacgtctcaggcatcgacgtcaactccggctgcccgaaacccttctccacgagcggcggcatgggcgccgccctcctccgcaccccagacctgctcgtctcgatcctggaggccctcgtcaaggaagtcgggacacccttccaaatcggcatctcggtcaagatccgcatcctctccaagcccgaagaaacagaagccctcgtctcgcgcctcgtcaaaacaggcatcacgggcttgacggtgcactgtcgcacgactcccatgcgaccgcgcgaacgcgcaatccgtgaccaactccccatggtagcgaggatctgccacgacgccggtgtggcgtgcgtgatgaacggcgacgtgacgtcgcgcgaccagggcctcgcgctgatggccgagtacggcgttgacggtgcgatgatcgcgacctccgcagagaccaacgcctcttgtttccggactaacgaggatggcggcgtcgcgccgtggcgggacgttgtctacgagtacatgcgcttctgtatggagtcggagaatcggctgggaaataccaagtacttgcttaacatgctgattcccggaaaagacaaagagttcaaggatgcgaaactgtcaaagacgtatcttgatatctgccgcgcgttgaaattcgaggatttgcttcctgctgctatgcgtgttgatgagctactcggtctcgatgagaaatgggaggctgcccccgatacagaatcccaggcggagcctaaatcaaaggctgtgcagaatgccaaggtgtcggaggctgctcgtgcagctggcggcggtgctgttcggactaagactccctcgccggctgttcatgcgggtggtcctatccggcggtcttctgctcctcagccgactaaggttgttcaggttgatgctgagcagccagctgttgaggctgctattaccgctgcacagactcaggctccgtctcaggtgacggcgtaaatgatgcttgcgttttctgtccattgtcacttctcttcacatcttgtcttcggtcccatgcatagccttcggttttctctcagttcattcttccttttatcttgcttttatctgcattctgaggtgtttatgattgctttcatctgttctctctatagattattccccacttatatacaccatgctccttgatgactatctagtccttattacaatacatatcactctacgcttaacagagcttataacatcgtgtactaaatcaatggtagttggattcgatcctctaatctaacaaatgatcccccccaaacaccagtattatgcattctctgcatcgccatgcagatactcacaatagaaactccagtgtaccctttttttgttttttttgttttttgttttcttgttttctcttctctttgcgctcgctcacttctctgcagctgccgctgcttccgccgctgcctccgcctccagctcggcaatcatcatttcctcgacggccttcatgccgacctcctcactcttcttggccccggcctcgtcatctccagccacggcctggtcaagtgccagcttggtctggcccagtgcgtggatctgctcctcgatggtgctcttggtcaccagacggtagatctcgacctcgcgggtctggcccacgcggtgcgcacggttctcagcctgcacatcttcctgtgggttgaaggaagaatcgaagatgaccacgcggttggcacaggccaagttgataccggcaccaccagccttggtggacaggaggaagacggggatctcggtgcgctcgtggaaggcgtcgaggatggactggcggtcctccacgttggtgcggccatccaggcggacgaactcgattttcagggtttccaggacgtgctcgaggatgtccatcaccatcgtgaattgagagaagatgagggtgcgatcgccattggcgatgaaacgggtgagaagctctttgaggtgctccaccttaccggagtccatccattcatcgttcttgagcttgaacttgccgagggaattggggttctccacacacatgtggtggcactcgaagtcgttgtatggcatgagctcctcgtagatgatgttagggtcggatagcgaccacttgtcttccttcaggcaggccttggccatcttctgtagaatctcgttggtgtagtgacgacgagcaagaagggggtgaatagcggcctggcgcagcttcatgagaatgttggcggacttcgacccagtcttctttccagcaagacggtctgccacgagctggcgcacttctgccttttcgtgatcgtaaatcttgacctgagaaggtttcatttggcaccaaccaacatgggagtgcttggctggaagatcaatgacctggtgcttctttcgtcggaggataaagggcttcatcatggactttgcgcgctcaatgcgctgctgggataggagagtagcgtgggactcgtcggtggtcttggccttgttggaaaagactgcatgaaggtcatccttgtgctcgcggaagaccgagggaagaataaagccgagaagagatgccagctcctgcaagttattctggagaggagtaccagtgagaagcagacggaaacgtgcccgaattcgaatcaacttttcgtacagctgagattgatggttcttcagcatgtgaccttcatcgtagacacagacagtgaaatccatatcacgtaagaacttagcatcaagctttgccttggcaatggtgtaggtagtgatcacaacgttgatctcgtcacgtcgttcctcgatctcctcgcggatgagagcacgctcattgagaccggcgtagtaaggcatgacgttcaagaccggacagaatttctggaactcgcgaagccaattctcaatggtggaagatggaacaacaatcaggtgagggcccttaatgcccttctcatacagatgcgcgaggaatccaatgacctggcaggtcttacccaggcccatgtcatcagccaggatgcagctgaggttcttttcaaacaacaatgccagccagttgacccccaccacttggtaatccttcatcaccaggtcgtcggccatgatagaaggctgtgagataaaacgagatttgcgctttgaaacgaccagtttgccgctttcttcgtcactttcggaggattgacgttcagttgtaggagttgcaataccagagtcatgttctgatttggcaggagcaaggttggtaatttccaagtcgccctttttcccgaaggtgtcgacaccccatttcttcatctcttcggcgactggtttgccgagctcctcaacctcgccaacaagagcgtcaatggccagatagccagtccacatatcaatacacttgtcgacaatcttgtctccgatgggcttaggggccttgcctcctctcttgcccttgggcttcacggcttgtgcgactggagcagagacaacacgaacttcatcgagagtctcgtatggacggttcgaaatgatgatttctgcggttgcttcggggatagaggcaatatcagcgagatcctgaacacgacatgtgttgaagaatttcaggaccttggaatccaaaccgccagcggtggattcttggacctgaacgtttgaatcatccgaatcactcatcatagcctcgggggactcggatcggtcgggggaaggagctttgcggcccttctgaaggcgtcccaacttctttttcgggggactgtcatccttgattgtgatagcacgggaaggagaaatagcacgggaaccatcagacttgggtccacgaacgagtcggcgacgaggctttccttcgtcatcggattcctgacccttgggctgcttcattgctgcccacttgtcctggatggtgccacgggctttgatgttctgcttggccatgggaacggggcctgtagcgggggaggcactcaattcatcatcggaggatgcaatcaccacaggaccattttcagaatccatcttggcaaggatctggagcgcgccgtcgtagtttccctttgctttcaacatcgcatccatacaggctagaacagtcatatgcggcataactttgagaatacgctcaactttaacacggagtctgaagtcgttgatttcgtgaagggggatgtctggaactcctgaaggtggcgcgcgagagggcgcatcctggcgggctttcttcgtggcaactcccttgggtgccggcggactcatctgatctgcagtccgcttggtggcggttccagcgttttttggatcgtacatggcagaggcagtaatttctcggaaccgatccattgacccagcatcagggcgcacgggcgactccatgatcttttctttttcagaatcccgagggggcttcgcaaacatggacggttttatgtcgggactttgtagatgacactcttcgtctgaagagccacctcgatatgtcgggccgtcgtcgagatcaaaccgcggtgttcgtttggtaggaccagaggcaggagggcgaaattgcgtcccagaaggagcgatcaaggatgagagtagaccgccttggactcggcggggaggagaaaaggcagggcctagcggtgaagatgcagcaacttgaatgacagtattgttatgtcttgagtagggatgttcaagtagttgtgttggttgggtcaatctttgcgatggggttgtcgctgggagagttgcgatagtttcgtagtcttcgccgggaggggtactcgggatggtttttatatctcgagggggggtactattgatagcttcttccattgctctcaatacaacaatgtcattgaatcatcgactcatctaattgttcagcgctattcaggaacgttttttctgccaaagcggacacgcgccaccggacgcgcccaatcacgtgtgagagccgtcaattaagctgtgaatgagaacaaagaggtgagacatcttgagcagttaagccacatagagacgactaaatcagactcagttctcaacttgaatgaacaatgaaccgcagggaacagaatcggaatgagacaatgagacaataaggagtcacatggcatatacctcaacccaccaatcaaatgccatatgacggcgggcactaaccttctctccgcacttgcgatagcttcagctcctttgtctctctgaccttccctttttcatctttgcctttgactcacttggatattgttgctctcaagaaacaaggatgtcttcccgacgccccgacaaccagtcctacgccgatgttgcggcgaagcctgaaccgcaaggcacttccgacgtggccccagctgttcctgcgtaagataatgaccttagaagcttagattgattcttgaagacatattcttattagctctggtatttagagatgtgatctacaagctcctcggctttacagctgccatgatcgttggccctattggcatgtatttcttgactgtgaattcaatcttcagtggtgagtatttctgcttccgacttgcaatggcatatgctgattgaatcgatgttattcagggagctcgacacttgctggaatcaccgccgccgttaccgccaacgcggtcctgttcacatatatctatgtcgcctggacggaagaccaggaggatagacaagcagccagcaagccagattcaaagaaagcccagtaggttggataaaccggatctgaagaaaatcattacttttcggcgttacggcattgttcaggtggttggggtttctgttatgtataattgggatggaacaacttcggccatctaaggactcaattgtaaaactatacattgactgagctattcattttactgttatatatcccggatatcccaagataccaagccccatacttcgatgtcaagccattaaaaagcgctgttcatgttgaaagaaccgcatctagagacgagaaagacctcgacccatgctccagtatagacagatacgccgatatgcattgcaacagaaatcactcccacatattcccattctcggctccacatccgcttaggtaggtctgcgcttgacaaactcctccaagtccgccttggtagcaacacccagcacaaacttgcgcgcctcatcagtgaccacagcaaactgctgcttctcgcgcttctcgccattcggccccgtctcgctctcgaagaagttctcgagctcctcgagcggcgtgttcatcgtgatgacctggtagagaccgcgtttgcggttgaaccgctgcattgccgcggagacggggtcgctttctttcacggtgccgctctgcagtagctcacgtagccgtgggatgctgaggtagcctagcagggagcgctttgtcggggagataacggtgaggtgcgtgtagtcgcgctcgtaggcggccattagggctgtggagattgggtcttcggaggagattgagagcgccgcgggagggtcgaggtcttcgattgttgcctgttttttgttagtttgggccagatggttggattgggggagacggacaccgcggtacttgtcggcccaggctgctgtagatgtatttgtgtcggagggggtttgcttctcgcgagtgaaggcctcgctggcggtcgagtatgaagccattttgagtttgatcgggatgaggggttggtgaggggcagtggataagttggagagttggagggttgttaagaagaagtacaggtagctggaaagtggagaataattgtccaggtgtaaatattgagaagtcaagtcagggttctcagtaggtatacctaaatcgtgcaggtcaagagcttgcaaccttggggatgactttttgatgtcaagcttggcattaactccactacggaagacgcttgcggccacggaggctatcagatctatatttctattttctctctgcttgcttttaattgcaaagttagccctagagtgtacttcgatgatcagaagggcataaagaaaagtaggaaattacggactaaagacggcctctggtcggtataacatcacccactatatatgaagtatgtccagaccataggcaattaaacatagcatcaggaaatgttataatagatgccccgatctagaatgatagaatctactttgcggaatatattcccataagtatatatacaaacggggttctctcttggcctaggattgtaatcctggccaggggcatggcatgtatacatgttgtagcatgtcaaaaggcacagactacacggagatagctataagtacattcaacctcagatagctgttatttaaagcgtaagaattaatttccccagagtacatatcaagactgaagtcatactcctcacaagtccggagtaccccgtatccttgtaccccgctagcgccacttacaacctccgcacgtcattgtcttgggatcttgatttcccacctcatctcaattatattcaaaatctcatacagattcaacaggaagaaacacatcagtacactcaaaacccaccctttggtggagatcaccggatatcaagccgactccacttatacccactacccgaagtacaccatgcttccggactggatcaacgctttcgccgcccagcatcctctgggtgccgtgagcgatgcgaagtccgcgaaaaatagaccgtttacagcttggagtgcactcgacgacgtgaagaccaaggccgacggcattgccaacgaggcgagccgggaattcaatgtcgcaagccagaaggctcagcagaagaccggcaagatccagcctggctctctgaagtactatgtagcgtgcacatttggtggaatgatggcatgtgtcagtagcttctctgtctgaattatgatcgccagatactcacgcatatcagggccttacccacactgccgtgacacccctcgacctgattaaatgtcgccgccaggtcgatcccaagctctataagagcaacctacaagcgttccacactatacgtgcggctgaaggtattcgcggtgtctttacgggctggagccctacgttcttcggctacagtgtaagcctggataacctgtgggtcttttaccttaattatctatactgatggtatacaggcccaaggagctttcaagtatggaggatacgagtacttcaaggtgttctacagcgacctggtcggccaggagaacgcgaaccggtttaagactgccatctacctgacagccagtgcctcggcagagttcatcgcagatctagcgctgtgtccgttcgagtctgtcaaggtgcgtggtcagactaccattccgcctgagattacaggtactttcagtggtatctcgagtgttgttgccaaggagggcgttgctgggtgagttgacatatatccttttgttctggatcgaatctatatactgaccctaccagtctgtacaaaggtctttacccgctgtggggccgtcaagtcccctacacgatgatgaagtttgcttccttcgagacgatcgttgagatgatctaccacaatctgccaggccagaagtccgactacaacaagggtgcacagactgccgttgcattcaccggcggttacctcgctggtatcctgtgtgctgcggtatcgcaccctgcggatgtcatggtcagcaagttgaacgcgaatcgactggcgggtgaggcattcggcgctgctatgagccgtatctatggtgatattggcttccggggattgtggaacggactgcctgttcgtattgtaatgattggtactttggtgagttgttcatgttcagtgtggtcaagctggtgctaatatattcgtatagaccggactccaatggatgatgtatggtctcgctttctttcgtttgtgtggatatatactgaccctgattctacagctacgattcattcaagattttcatgggacttcctaccaccggtggctcaagtgaagacaaaaagaagtaaggtgtctggtttgattcgggtagtggtatgcacagctcctttatcctttaccatctcggcggctcctgcgatattctatcaagtaatacatactctctctagttatcatcgtaatataaagtaaccgccaagctcgctatcggccaattacagtttgtcagtggccgcctctaccaatcggaggccgatatcttatcgtccctgcagttgtcgaatataaaatgtcaatgtcgttgaataacatccgaatgacatccaacttagataactagacaagcgaaataggggacctcgggaaccgcttggctcatttcacgacgaaccacctctattggctgcgaatccctgtattatctacccgatagctaccatccaggtggattatacttaaaaagatctagatccccccgaaatccacttctctacattccccgtacgacttaagaaacagtaagttcacgtggatttccccgccatcgcatctgtacctgcatgtatcgccccatcgataaatatcttccctgccccaccattcttcctttcgcatctaccaccccgcctctacttgcaacgacacatctacgaacctgaacatctatctctgacagaaactagacaagatgcccgataagacagaggccgaggcatccacatccgacgcaccgatcgtctctcacggccgaggaggcaagcacccaagtctatgcgtcatcgcgcccaccaactaacaagctcgaatattaggtcaaggcaacatcggcaaggataacactgagtatgtcccatcgcagtcgcagtcgcaacaagcgacaaatactaaatatcgaatagatacgtcgatggcgagatcgtccgcgaaggaaactacggcgaccaaggtgatggcgcttactctgccggcgtgagtacttacctacctaccttcctacctacctacctacatctatactttgaacacccaaatccatcttttagcgatgtccatactgatacaactccagcgaggcggcgctggaaatatcggctccccgatgatgcgccccacgtccaaggttccccacgacaccgagatgatccccgagcttgcggtccgccactccacagacgaaactttccatatcggggtaagcagagagttgtttgctttgctttgcgtttgatttgatttatgattgattatcccgggcttatggtttccctttccgaatgcggttgtttttactttctttttttcccttcctgcttttggatttcaggctgactttttcgtagcgtggtggacagggaaatgttcattccgaggatgcgacgaagggcaagaagaaggttgccaatgagggattggcggataagttgaagaataagttgctaggacggaagtagggtagggccttttcatcttgtgcttcttttgtgattcccaattctcgcggtatcaattaatttccgggttcattccggatttactctttctctaccatgttatatgtagataccaatctcgaacagtaagattgacggatatcatgggagatagctatgtggagtagatacagatcaatatgaataagaaattaaaaacgaaaacaaaataatcaaagaaacaaaataagtgccaaatccatgacgtgtcccatgtgtccatgcatcataacctcattagagcatgcgatgaaagaagtgaagaagcaaaaaaaagaagtaataaacacaacccacatccataaacaaatagaaacgccagtctgcagattcccaaacaaaaggagaaaagaaaatgaagtgtccagatatatcaatctcacatggacattctttatttatccttgctgaaccggcgtttgaaccagctctttcttttatccgctttctcacccttcttgctgacagtcgattgtgtggtggagatcgggacacctccaacgggtccgcccatggtcgggtcgcggatgggctggacagggggtgccttggagttgaacccgttgaacccgtactcggcttgggaccgctcgtccagacgctgttgctgcagagcctgctgctgcaattggtcgttggagctgttgatcgagctggggtcggtggactggccgtagtctgtggtgccggaattgttcgacatggccgcgatgttgtcgcgcgaccgttggtagccgtattgcgagccggcgatgttggggtagccctcggaggggctgatgggcgacgagggtgacccgcggggatggtgcgagggacgtcttctgccgttttggctatatccgttctgattatatccctggttataggggacagaaccctcgggtgagagaggcgtgttttggtacgcgttcacgatgctgtctggtcgcgattggccgtagtagctgttggatggaccatttggacctgggaaggttagaagggatcgaagatgggattgaagatgggagagatagcatacttccgtagtagctggtccgtcggctgaagtcgcccatttgtgacgcatcctctatcgaataatcagcctacattcattgtgactttccacagtgccaatacctgttctagcatatgacgcacggttattgatacttgtgccgtagatagcagcctcaaacgatcgaatggtatccaaggggcgttccagacgcggccgagtgggatttgacaggtcgggatcggctgaacgaagtaaggagttaggagacagtcccagggaggaaagattgccagtgatacggactgataacattgccatattgatccttgaattcaagctcgcgcagtgagcccagattggacttttgcaaggccacggccactattgtggtgtcagttgaagtaaaatgggacatgggaaatgcgaggtgcgaggtgcgaggtgcgaggaaatgcgaccgggccaacaaggtggtaaacatactaggctgaagctcgttcatggcgataagtggatctgctttggtatgtagattgcgacgagatttctcttctgaagactccgagggaccacgtttatggcttgttgatccggacttgtctgacttgtcggatttcacactgaacccacgactcctctggggagtgggagattggggggagtccattttattaggggcagttcggtctttcttagcgtccgcgattcaaggaatgtctgaaacggttgtgatctaccaccgagagtggagcgtgggaactgccaagaatatcacgattcagctgtagattgaatgacggtgaggctggtcactagctgaaacgatcgacacgatgggatgagtggtgaaggagcagactgggagattggattgtgcgtgtgattgcggtgattggtgatttcggtgtttgtgatgatttcggtggtcttagtgattctagtagcccaagtgatatggggtgtgaactgtcaaaagagtggagcaaatgaattacacgagttcaagagtacaggggacagagaagcagcgagagtagagtgaaactgtagaattgcagagaaaaaaaagcgaagatatttccaaagttttccaaagaggcgaaagggaaatggacggtttttatcggtggaccacgcaatcccaaggtctactggtacttttcgagtgggttttcgtttttttatgcataagcaggttattgcggttttattttagtttattcagtgggtagatctagaatactgagaagactgagttggctatatgatagtggcatacatagtacttattagctgtcttatacaacatacacatcctattgactatgatccaagacataatataatacgtgcaacactccaatataatccccagactccataaaatacatacttaggcttcctccataccaagaccagcccaagaccttcataaaaagtctcaccttttgtatttgactttctctttggctttcattccctttattccccttcttccctttctccagcctttctagaaactcataccgcgtggtacatccgggctattccaattggtctgctcttagaatgcagtatgctgtccttgtatgcattccttatgaacaccctccgttgtgcaaaccttagatttgagcgaatgctaatgaatgcctacaatgaatgcccgagtataaaacctgaaacctcacctgttcaccaacctcgggtctgaatttctagatcggaggcctatttttaggaaacccacacgggccaacggtccgtggtttcttactcgacgcgcaagacgatcccgaggcactccaggctgacatgagtcacattctgaagtgatagaccgttgagttataaataaaaagcagagatttccacgtcaagggtttcaatatgaggctggggtaagtcaaggtcacggtctcggtcacggattatgcacagccacggcataaatatcggcacgggattaatgcatccatcacttctactaaacaatcaccattcctgattctgcacaataacagaaggaccaacatattccttccggcccttgacaacatacatcccaaggctgacgataaaaaccccaacaaagataaccacactccaattaaagttctccagagtgacgtcggcatccccgggccacaacgaccagaagaacgcgaaacagcagtaaaacagcccaataatattaaccgccagtccccaccgtcccatatcccaccgacgcggcggcagggtatcaggataccagatcttgcggtagatcacgcagctaatcgatgtaatatacgtgtacatcagcgccgccacgttgagcgagataatagcgttgaacgcagtctcggagccgatattgataagcgataacgcgcagctgatgacgcaggacagcgcgatggcattcacagggatctgccgctgggcatccactttgccgatccatttcgcgaatgggaggccctggtcgcgggcaaaggcgaaggtctgtcgggaggtggaggcgttgaagaggatgttgctgaagatcacggggaggatgataatcgccgtgagtccattggttccggcgatagacgttgccttctggaagacatacaggaatgggaatcccgtggcgtcgtttaacgagtcttcgaccgacggcgtggcgaagagataggtgatgatcatgacgatcgccatgaggccgttactaaagtagccccaggccatggcgatcggcacgtatcgagcggcgtctttgacctcttcggacatgtgggccgttgcgtcggagcctattttgacttagtatcaggttggagtctgggctacgggcttgcagacatactcagagagccgtagatagctgagatctgtcccaccatcacgctcagtcccatcgtagaccaaccgccgtaattcttccactgcgtcacgaacaccgcttcggcggattggtgcggagccatcacccacaggacgattataataaccgcccacgatacaacgtggagaatcatcagtagattgttcagtacgggcatcacgtcagatccgtacacattgacgatataaatcaccaataccatcgcaaagacgaagagcgtgccctgccaaccctgcggatcgtaatccgggttccgcacgctgatcagtccctggatgatagttccagtaaggaatgagccggaggctgcgccagcttgccatgctaataccgacatccagcctataaacaatagcactagtcagaaaaacaacatccaactagagcaaacaaacagaccggtaatataactcaggaacttctggtatcgaggcgaagaccactccgaaacccagtgatactgcccgccagaagttggagccatagatgccatttcagagatcgaggcgatgatgaatccgaatccaatgaatgtccatagataggagtagaagaggcctggtaagcctccgttatacaagccttcgtaattagagctgaatacagcaggaatcagagatgtaaatagacataatcttgtagtatgatattcatactcacataagaataaactcccacgtcgcttgcaaaaccgacgcaaaactcaaagctgccacaggtcgcatgtttctcttgataatgtcagacatatatcaacgccgtgaaacgtatacataccttgaactcctgcgcctttcccatccgctgcatgtcaatgtcgtcgacacctgcgcctgcctttaagtcatgctctgaaaaagcatcgcgctctacagcttgcacctcctggtcctgcatttctagcccaggtgctttggtcatggcgatggataacctaaccagcgattgagcgggggagaaatagaaataaatagggtaaaatctaaaatctaggggaactagaacaaataactaactaccaaggcatatatcccacattccccgaataaaagtacggagtattggccgacatccagacgcctgcagggcttatcgtgaggctagtctctagggcttcgtgcggagtggatcctttggctgcaactggcccgtctgggtgctccgactgttgttgattctttgttcacatatgtaggaatgatatttgcttttattgaatacgagaaatgctctcaattttccgtaacgaaaaaagaccgtggatctcggtatctagtgcaaggggagggtgtacaatgtagggctgtagggaaagtgcatcgacctcccttgcgcgatgactatgtggggaatacgcgcgccgcagttaatttgtgcaaagtatatacatgtacataggtagtcatttctggcgaggatgataggatattactctcgcatggataagaagatgcgatagtctctagtctgctctttttccttcgggctagggcttacagctactaatatgagcacatcggagacattgagtttaagattgatacaacagggatagagctggtatacgtctaatttccatacgtgcatacaagctctatagccggatggatagcccctgtacaatatcagacccgtatgctgtacatatcaagcattacgggcgcataccctggtcacaccttaatgcagactgatattggtggcttttagattaaaagttaatttgaacttcgtattgaatggtcttacgtaggaaataataccgccatctagttagatcgattaatgcgtaggatatattccaatctattctacgtctcaatcgctctataattgctttgctaatcattatagaaatctggagaaattcaaataaagccgatcggctaggccgtcccagtttgtctggaaaggttcatatatttttatacataatgcatatgctcggcgttgagtaggagcatgaggggtatcttgtctatctattaaataaaaacgtgagttcccgggttgaatccggagaacatgcaaatcgaagaatcaaatgactcaattcgagcgacgcgcttaagcagttgcctcgtcggctattttggacgggacgtcctccacggtgacctgcacctcgtggctgtgttccaattccgacaggacaatccacgtgggaacgaacgcgataaccgtgattccaaagttgagaccgatgctgacgaagtggttggcgccgccttcggtctgcatggcccatgcgacggtctgtcccagagcctcgaatccacgcaggataccgcagtggtaggataacgatgagatgtcggtgctgtactggccgaccagccagtagaggaattgctggaaggcttggccgctgaaggtccagaagaagatcagcgcgtacgctttgttgaagcccggtgtgaaccagtcgaacaccggggactcgggtaggtcgtagaactgcttctgtaggatagtagcccagatccaggtgccgatgatcagggcaacgacggagcagaatgcaattctggcgcgggtcttgatgaagatggtctggcgatcaagcagcagcgccatgatgaacgaagacgcgattccggcgaagttggtgaggaaagatgagaatgcgcgagatcgcacggtgaagtaggtggtcagccaggtgctctggaagccgttgtagaagtaactgatgaagaaggctggcaggagaaggagcacacggcgagtgaagatcagagaaaaggcagccttgaattccttggcccaactctctttcatgttcacaaccacaagagagtggtccttgcgctgcaccttctcagcaggactgagtaggagcgaaatgggcaaaccgaggcacataatgacaatgaagacgatataagtcgaagcgctgatcgttccctttccggccgtctgtgcgtttagtcccagactgattgcaccaccgacgatcggaccagaagatttcgcagtctgccagacagcgatgtagaaagcgcgctccttgggactgggataaccaatgataatagcggcctcggcagcccagaaaaatcccgctgagataccgcacagggcggagccgaagagcatgaaccatgtcgtggtgtggtaggtgttggtgtacagaccggcaccatagatcgggtaaccgatcgcaccgagaactagaccgtagcgtagaccaatacggttgttgattgcaccagcggcgatacaaacaacggcaaataatccgtagaccaaagcgttcgccgcggaaacagcgtagggctcggctgcaccacctgctccgaggttgttcagtgcatcccacattccaggggcagtgaatgagacaccactagccacggcgatctggaaggggatagagcggtaccatgaagtccgagacctggtgatagtttgagagtcatcttggacttgctcagaaacgacttctgacgcgacaggaggggccattgtaaatgtatgccctctcaagagtctttttcttgtatacaatataacaataaagaaaaaagaacgaggacctggcgaggaagttatataaaaatttgaagaatcaaggtggatccgctatatgtcgtgcttgatgccaagatattccaaaacagcaaaagcagaatctttgacacatcgcaacgtcctgatcaccgggttttgactagcttcgggatttggacagcaaccctgtggagtggcgtgacaggttgtgcaatttccagctcagaggccattttcttgtattgcatataaggcagttccatcctcacacattggacaacaatcgctcttttcgcgcgtcgcgatttgccagaaaggcgatcaggccaacactcaggaattgtgcgacagtggtgaccaaattcgagatgaatcccgctcgaaagtctggggcagaaacagccggatactgaaatatctgtgtccatgctgccatggcctggccgattgcattcatgcttgccgtgacgatagcgcgttcttcggcatccttggccatggtgatagtcgcccaactcatactgagcggactaattgctgtggaagatttagtatcgtttttgatgctagaaataacagaccagagcctgtatctgaatccacataccgccctcgaatcccgtgaggataaaccccgccagtcgccccgtttcgccgacattatagacaacgagcaaaatcacaccaaccaggacgggaatgctggtcgccaccgaaggaatccaaaagtttcgcaggcgatcggcggtaacgcctgctactagtgcggctacgacagacaacgccgttgcgattgtcggcaatgtgttcacccgtgagacggagtagatgtctggtttggccttgagatataggctaaatggcgtcgaatatggcgtgaagttctggtccattaaagtccaatgcaggacaaagacataccaatgccatcgtccgaagactcgcttgaagatggcccgggagactttcagctcactcggcgctgttagacctttcagacgaatattggcaacatcgtgctcggtcgcagttaggaaccgtggctttgcgcggtgaggaacatctgggaaaacgatatatccactgatctgtgttagacgaacagtgaacagcctcggaatagggttcttacagaatgcaaataggaattgtgataatagtgcaaataatgaacagccatctgcaacgggtcagtatcaataacatcacatataattagagtcaaacctccacccaggcaatccatgcctcccctccaaattcgtataggcagcagcctgcaagtatcccgcgaacatagtcccgagtggagaagcgataaagaaaagcgcaacccgccgcgtcacctccccgggcttataccacgagccgatgacatagatgacgccggtgaaagagcaagactcgcagatcccgatgaagaagcgcattgcgtatatcgtttttagattctgcgcccacgcacagccgaatgtgaatagtccccatcctatttccagagtcggcaaggcaatgttgatctgcgtgcgcgttaggtagtagcaggccggtatcatggatgtgcaatacgaggcccagaataccgcggttatgtagttcaattcgttgccgtgcagattgaggtcttctttcatgcctctattaggtgttagtaaggggggtctgttacactgagggtgtgacatacgacacataggcgttggtgatcgcctgctggtcaaggtatttggtgaagaatgaaaggcagccgaagattagaatcatgatatccagtttgaggaccagttttttctccgggtgtggcatatcctttggataccacttggtatacgtaaggaaccggagccatagtccatcctgtagctctgtattgggttggaattcatggtcggatacctcatggatcgacttggtaccaattgcgcgtacgttctccatatttgagtatatttgagtcgtttgaacttcgtacgggatgtacagctggaagcaattatccaagctgaccctctgtggtcatttcggttgtgcaagcctcgataatggaagatgcgacgattatcacgcctgatggtgtcatctgtcatctccgctgcttcatactgcggagaaattgcgaatcgcggagactggccgagtctgatatgcatacctctcgttagtgacttgggaaattgaaactagcttatcttgaatgatcaaattcatcattaagaacgaaagattgtgatgttccagaggttgagggcccgggccctaagtatcgaatatagaatgaagatgaattcctgaactgctcagaactgacatgatgtgtaacgcttgatgtgtatcgatgtgaagtgaaaacccctaaaaaataaatgctcataatcatacaatgtacaccccttcctcaactcctaatgtcgatcttgtactcctcggcccagaatgtgacattgtggtccacagagtaggtttcggttccgaaactgagactgccaaggtagtcgtctttagccgggtaggtacttccttccaagttgtacagatcggtgatgagaggataaatgtctccagtaaacctctcaaggatcgtgtccgcgacccaggacaagactagctgtccattgtcattttgaccggtgtaaagcgtgctgatatcatgttagcgtatgatatatcaggtacagttcaactttcaactcacaatttcgttccttccaaggttctgttaatcactgggctcccccaaccatggggttgagctatctcgtttgacatccagaaccaaaccatgacctcgaatttcgcattagtttcgttcttggctttgtcggcatcggtatccaagaacatatcaatggcgacgttagtggcaagggtttcagctgccaacgcttctacatcggttgattcggcgatctcgtcacccactccatatgtccaatgcaggtcaagatataattcggagatcgtgtccatcgcttttggcaacacatcatcgacgcgaatattggggtatccgtggacaggcgcaatctctgggccagggtcgaattgccaggtgatggagaactcgggagcggtctgggttggataagtctcgttgacgaatgtcgtgacctagatcagatgatacattagtacgtccgctgtagaagtgcagatggatgttcgatgcgtacattcatgcagagcccgtttcctgttgatgttgatgtcacaccccattgatttgggttcactgtaatctctgtcagtcgtcgttcaagtcaacagcgcctgcgctggtaatccaagagcactaacgcgtgtattgttcggatttcgacggtggactgattccgattgaacgattgcagtactgggtgctcgacacgccattgttcgtgacagtgtgatggccaccaccgccgccgccagtactgtcgctgccagagttgccgccagagctgccgccgccagtgctgatgccatcgtcagtgtcccccccggtgaatagaggtttctgaccattcgctgctcggtgggcatcaatacccattagagctccaacgcatcccccaactgggatgcccaccaggaccgcattgaccagtagtcctaacgcgacgaccatgaccaaaaacgagagtggtataaagcaagaaactaagcgagagtgcaaatgataaaggaaaagcgagcagcaagtacggagtacagcgagttagcagctgaaattctcggcctcacatcggaagatgtgaacgggtggatggagatgcatccggttagtctgtctagggcgatcgagaactaagcgttgaccacacaaatcttgttgataagaaaagggccctgagtggggtaagtccaggtaagcgtggtaatgatgtgctcatgacttgtatattacggggggattcaggtacaatcaggacgatctggtacttcaggtacagcaggtacagtctggtacagcaggtacggaaccacatcatttaccgatggcacttttactgcatttgaatttatcattggttcagttcagtggcaaatttatagatgaaaacatggaaccatggctagaattgctaaaattaccgaaaaaagaaaatagattatttaaagacccactttgatgcaagcaaaaattaccacaaactcaaaccccgtatgtaagaacctaaagctcagtgaaacttacgttgaaaatttcaccagaatctatttttgcggctcgggcctaaagcggccatgcacctcggtccttggcatgcactagtcccagggcttaaccagctggtcccttagagatcgctggtttcgtattcttctttactaggaatgtgagactttttctcttccatccttccattccagctcttcgggctgatcacactcgttttcgacgtttctatcccttccaacgctttcaatatacattcttcgcctttttgactttacataatctatagcctttctgtcgaaatggacaggcgtggtggtcatgacgaggacgaaaaggtagaactgaatgcctatcctgccaaccattcaaaccacagcttcgaatctcagcctttttcaccctcaccagtaactccaaggcctctcactccagtcagaccgggtcatttccctaccgatgaatacgggcaacccgtttggcttcaacccaccgctcgaatgtcgggcaactccgattcctttcacaactcctcctgggacctacgaacgccgtatgattcccggtcggcttcacccactctagttagtacagtccgtctttgtttctttggtctctttgttgtcggtatagatccagcctaaccggtttcccatacagtatcaaaacaatggagtgcaagaaagccaccagagtctagctcccctagtgagctccccggctcccccgggatttgcaaaggattgggtcaagtctggatcgattgctcgaattaacgaccgtgatgatgcggatacatggaaagggtggaagagatgggtatttgccctggtaccgtttctcacattcgccaacaccggaatctacttgttctacctcgggctgagaattgcctgcattatcatggctcaaaatgtttctggagtttcatatgccggagcttgggtttttgtggctatcgagatcactgttgcaatcccctccctcatgcacaactgttggactatgatggcgttgaagaagagaggccgtgccaagctgagattgaccggcaatgactgtccgacagtggatgtgtttattacctgctgtggagaggatgatgaagtggtcctcgatactgtccgtggtgcgtgtgaccaggactaccctcccgaccagatgagggttatcatcttggacgacgccaagtctgccaccctcgaggctggctgcaaccaactcgctgtgaatcaccccaacatcatttacatggctcgtgaaaagatccccggaaaaccccaccacttcaaggcaggtaatctgaactacggtctggagcaggtcacccttttgcctggaggcgccggccagttcatggccgccctggacgctgatatggtaagttacaggtcccggcctacgttgaaattgaaattcctgtactgattgacaatctgcagattcctgaacaagagtggcttcgtgcgattcttccccacttgttggtggatcccaaaatggcccttgcatgcccgccgcagcttttctacaatacccctgcatccgacccgcttgcccagagtttggatttcttcgtgcatgttattgagccgatcaaggatgccctcggtgtggcttggtgcactggatctggttacgtcgttcgacgcgaggcgctcgaagagattggcaacttcccgctcggttccttggctgaagatgtcgcgacctccacactcatgcttggcaaaggatggaaaaccgcatacatccacgagccgcttcaatttggtaccgtgccggaagactttggtggacatctcaagcagcgtacgcgatgggcaattggaaccgtcgacaccgctgccaagctgaagttctgtctctggggtgacgccgttcgacagatgaccgctgctcaacgattctccggcttcctctatgcaactctcagtgtctataccctcctgctcaccgcttccctctttgctatcccgatcatcctcttgtggggcaagcgccttgtcgcctttgcgacagaagagcaactccgctggctgatctggtcctgcttcgccgccactatctccaaccgtctgtgcgaactggccctgttcatcccggcgggctataacaccggccagcgaggctcccgctatcaactttggatgtcaccctatatcgctctctgtattgtgcgcgccttcatcctccccacctggctgggcggtcaaacccaagccttcaagcccactggttcgctgggctcagctctgaacgagcgcgacccgaacaagtccaagaacatgttcgtccgcctgcgcgtgatcttactcaactacatggccagcttccaccttgcctttgtctacgtcaccctcatcggagtcgtcatctcctcttaccgctgtttcgcccagaacagtggcttccgagatatcatcctctgcctcatcacgcacgctttctggcctccactgaccttccttttcatttgcacttcgctgtggaccccggtctcgtatgcgatcgacccgccacgcatgccggagcgtgaagaactccttacacgtgaccctaagactggtgtggcgcacccgacgaagaagagtaaaaagatcgccttcggtggccaggccgcttggttcgagcttgaatacacggttgccaccgtggtcacgattttagtcttcatctactcgtttatgttctaattttaagatttcctagtttggaaatctgtctgcatagctaacgtgtcacatgcttcaatcccgatcctttatcttatatgtatctatctacacctggggaatggcgtttaagctttgtgtctttccggtgtacaactactctgcatattcgatcttcgttatacatgaatacatatgttgatcaactccaaaatgacttatcgccggggctgtgtagtactccatgcataaatagtcgatacgtacggagtacagccttctacatgcccctttcggccaatcacctccagattggtctaagcgctggatttaatttcggaccaacgcgggttggctatctgagactttgacttgccttcagccaaatgcgccaatccgcgatattaattaattctgcattgaggcctgatagcccatttgccgtgtcaacggttatttactccctgctttattgcttatctagtgctattgattgcccacgcgtcttgatctgccatttattggacttgttctttttatagtctgcgcgtcaccgctattctgctgacgttgcttagccagagcctgtgcagagagcgacataacgttgaaagcttgactcaaaagtgagacagataattatttggactttctcttcatttaatattaatatcgaaagatacaagggtttgttactagctcagacggtcgtcctgagacttggtctttattggccactgattctctcgccctgaaacaacttcttggcgaaagaatcctcatgaatcttttctctttctgaatcttcgtcaataattagccaggttccatcgaggaacctttgttgatcccacaatgaatcatcgatgatgttggttcgcttgcaagcctcgcaaaagccgaccttgaaggatcgtgacctgctagttctagttctagttctagtctggcggcaatgccggaatgagtcatacgtttaaatgtggccatcgccattggccaatgtggcaatgtccacagtcttctctcgtggctctcataccccagattccaactcatggacaaacacttccatttaaggtatgtctaaaccgccggcgttgatcggattaaccccgaaccgctgacgggtcgggactttatcagctgcccgtcttgccagtagtccaggactctttgtgatgggagacgcctttgataggcttcagccactcggtccggtttccaccccggtcacctgatcggtttttaggtatatctcccgcagggaatggctatctgaatacaatcagcctccagccatgtcaccgggctcggattcgaaggtcgagatccggttatgcggcggattggattggtccacgcttcggaatccatgagatagttgcgattgcgatggctatatagaagagcagacgtctccgtctttggatttagttatagcaacgcaatcacaacagttttactatccaactatcatctctttcgaattgtattcacaatgtccttcctaaggaactacttcggtacctccgctgtcccggcgaaggaagagaagaagcccatccgtgccttgcccgcctcctggtacacatcgccggagatgtacgagctcgaacgacgctccatcttctcccgaaagtggcttctcaccacacacaaacaccgagtccccaagaacggcgacagtatcacatatgacgccgcgggctacgagttcgtcgtcgccaaagacaacaacggtaacatcattgcataccacagcaacgacctcttccccgcgcatgtgcacatcgacctaaacggattcgtctgggtgaacctggacgccagcgaaacccccgaggtcgcctggaaagacgacttcgagggcgtcgacgagcagccccggttcaagcaatacaacttcgaggactactccttcgatcacacttgggatatggcgggcgatttcaactggaagatcctggcagacaactacaacgagtgctaccactgccaggtcgcgcaccccgacatccctaccatcgccgatctcaactcctactatgtcaagaccaaggacggccacatccagcactacggcgcccagcgacctgaccaggtggccaagggtttcaacattgcagttacctacttctggccgaacgcttctttcaatatctcgtgagtataggataatatccctatattataataaacactaacattaaactcctagtcccaatttcttcttcatgcagcgattcaccccgaccagcccgactcaatgtgtaatgcgctacgaggtctaccgtcacaaggacgccaccgacgagaacttcaacctcatcagcgacatctacaagcgcatcatgtcggaggacaagtacctgtgcatgcacacgcagaagaacctcaacactggtgtctttgtcaacggccagcttcaccccgagatggagaagggtccacttcatttccagaagactgttcgtgatgttgttacggaacactttgctaaggaggaggctgcgggtcatcagatctggcctgcgaagcatgatcttcctgtcggccaggagcaggataatactttccgtactggtgtgtctgactacaaggtcgatactttcaagaactctatgggttctgggctctctacggtaacggcgattgctgtatagagctggtgggtcgaatagagatgtttattgtatatagtttgatattgcgtcgcattgtgttgatgataatgattgtgaatggttttcttttggaattcagccttaacagaatggatatttcgatgttttgatatatctttgacctccaagtctgataatgaccagcctatactgaccaacttggaccgtagcaagtgtatgaacagaactgtaaccaacaaactattctaatcaaattatcccgctaacattacattcatttatacatatacattctcccaaacccaatcactcaacccaatcaacaaggaattcatccaacaaatcataattagtcctctccctctccctccgtccccgaagaagatcagcagcaatatcaaacttgggctcaggtctagagccctccttctccggcgacgaagcccgactgggaacatttatatgtcgaacgacatcagtgttcccttcaacaggcttagtactgggcatcccagactcagaatctaccaaatcaacctcaaccccagtctgcctctcagcatcatgtacttcacgcccatcgactcccacagccttgacaccaagcagcgacgagccacgcccagtcgtccgcctaggataatgatacggctccgaagacgccggcgactcagacctcgcacggctatcactatgatcaacggaatcaaaactccgcggcgaccacggcaacctctgctcaagcgcatctttatcctccgacccacgctgcctacgcgcaccagcacgcccataaccacccgggtcgcgcgaacaataccgatgctcacacccatcagtcaacaactccgtaagcaggacatttaactgcgccaagcgcttgacctgtctagccgggatcgcatcctcgggatactgtttcctcttacgggctccgcgcgcgccgattccgattcccatcccgattcccatttcggattcctgttcccgttcgcgttctcgttcgcgttcgcgctcacgctcacgctcacgctctcgactctcccgcagcccgcgcgactcaaaccgcggcgactgcccggcttccattttcagcgcttcttcctcgtcgtaggcgatcgcgggcttgaagccgatgccgtggtcggtcagtacttggttgaggtagttcacgcggctttcgaggaaggctacgtagctgcgtggcacttcttgttttgtgagggggtcatagcccacgcagcgcacttgggctttttcgcaggattcgcagcgcggaaggcgctggtcgcagcggtgtttgcggatgcgacatctgttgcaggcggagacgctgcggaaggggggcgctggggggtcggtgggttcgtttgcggtgggttttggggttgggttttggttttggtctgatgtgagcggtggggaggttggagggtttctgcgatttgttttcactgttttggagttggggtgtggagtggttcgtttggtttctagggaggaggtagtggaggttggggatgggagtttcagcattgtgtatagtttataaggaattgagattccaggagtatgaaatgaggattttaagagctacatggtaaaatcctttcagcaagattagtatactccttactccgaagctatgtactccaaatagggctaatatttctgatagagttcggattccggttaacacaccggagctcagttctccccgggtactccataacggaggtcataactccgagtgggggtttctttgtttaaaagggggatatataaagaggtcactaaagaggtggctatgtagagcctttatatatctgtacatagctcctttacccctatattctacttcccaaacctcgatatcgagcaaatcgacccgactcggccgaatgccacgttactggaatgtggagcagccgatatcaacccccacgctgaacgtcaaaacttccccattcggaattcgggtgagagaggtcgggtatcgtctcggcttaagacggaaagcaacgccattgggtgcatggacccctgcttgtccccgcattccttatatcttggagagcgaagtacggaagagtataaccgatctcgcatatctcggttatacatggtaagccttttggcgttcttccatataggattgtatatccgaatggaagaatgataactgaattctatatggaacaggtataggtatcttcacagttatggcaacattgaagtgacatcgttctagccctagatattctcatctcacccatttaaaggttgaatataagcttctgtacatactctcaaggaagcttcctccttgtcgatcttccaccctcttcatgtcaatcttccgtgtcaatcctccaatctagtcgagtataatcagctagcttcgccctattccgacatagttcaccttcctcaagatccacacatctatgctcatactcaaatcacccgaagtgtccaggatcggtcgatagtgcacctgtaagtgtaagaactccctccgttcactgtcccgacttccccccgcaatacccgaacactcgcacgatgtcagaccctcggtccctgtttcaagacaagccgtttaccattctgctagcgtagccgaagcacatcctccggtctaggaccctcggctataacaagcccctaggggcgatatcgtcccgagagtttgaccggcccaaaccgacagtggcccgcgggggaaatgacttgtacaccggcacgattgccgattaaccccgcgagcgagtctggtcatgagccccgttcaacaattcccgtacgttgtgaccctccttcaaagtgcttttcagacctcgatcactctactcgtgcgttatcggtctctgcttcgcgacggaatatgtaacccatcatatatatccctcaatcataacgctgatccggtaattcagggcgaagtggttttccggcagtatcctgaggcaactcctgacaaaactcagtcgggtcggtaccacgtatctctcttacatgcatatgtggttgtcgttgttgcatttccgtcccacgaggaacggccatgctagccgcagcctgccgtgttgctcttaaccgtctaactctcaaccaaacaagtgtagccattgcaactagtataggaacgcctatcccaacgccgagtccgagtgcaagctttgctgtcgttgtgagtgctggcggttgatcggtcgggctgacggtagtatcagaggaagggaacgaagatgccaaagttgaattgactggaatcgaaggcgtggtctttgccgtcgatgatctttcggttatgttgaaataggcagaggggaaaccgcctggcccagggttgatccagaagaagaatgtgggtgaataatccagatcgaagccgtagagttggacagtccaggtgaagttcgatacatggtccttttcgtggacttgggctggctcttgttagtctgggatcttggcttcggttcttccttgggcataccgtatacgttgcctcgagtgtaggcgcctcctcctaatggactctgctgccatatagatacgttgaacactggtaggtctgttttccatgcaaccactttctggtcaccgagtgtccaaactggactttttccgttgatgtagacagggttgatcatataattggtcttttcggctttgacggttgcgaggagggcagagagaaggattaagaggggctggaacaagcgtatcatacttttgatcttcaatagtggtatggcagagcttaaatgttagaacttcacgtagtccacgggtgaaaatataagaaaggtggtctctgacgagtggacttaagtaggtattaggggctggcaatcctggttaggggtgtaaccaggtacaaggctctgaggtagtctgtattgcaatgcaatagcgaaaaagagattatgaaggcctgggattatgattccagctagcaattttgagtgagaaacctgagggataagatagaagtgttgatacctatatttgcctcactctaaacgataatcagacaattgttaaaggtatatgattgtctctgaggtattcatgtttcacttcgtagtctccgcagatccagatacttggcagcataatcattagccaataccgggtcgcccgtaaggtgcataacagtagccttcttggccatcatcttcgtctggcccttgatgtcctcgatttcctcgaaatgatcatacgccgagtcaatgtacccaagagcacggttgatgtactcctttctcgcagacgtcgagtcccgaccctgcaagctccacaactcacccgccatgcccatatttgcatccacgagaagtgaatacgcctgcgcaatgagactgaaattttccgactccaggacctggggcataatgctctcgactagttcgcccgtggcttcaaattcacgaagactcagcaacactgtcgctagtgtgcagatggattcccagaggtcagcgaggacttttgagcgatgtgcgatgttggctgcgcgcatcgcgagggagaagccgcgttgcggttggccggatttgccgaggatttgtgcttttaggcagaggagcttgacttgggagtggacgtcgaagttctctggttgcatggagtgcgcggcttgctcgaccattctcagcgcgcgaccatagtcgccttggcgcatggtgaagtctattgaataaaatgctagaagtaggcgcatgtcgaagtcacggagttgcactgcctggagttgggatataatgtgttcgacggcaaccttgtcgttgctgtaggctgttaggaatagatctgtaagaagtcatacggttgtacttaccgacagatttgtcgtcgcaattgcagtagccctgaaaagaaagtccaggcgttgttgtatctgaaagctcggagcttctctgggtcgattttgttcatccgtgtgaatgcctccttgtaattgcctttctgtgccaactgtaggtgatgaatcagcatttctgtcatacacattcagaaaaaagttgacatactatttggcaatttcggaatgtgatcttgacaaagtcatcatgaggttggccctccgaatagcactcgcggaatatctcggtgttcagccaagcaaggtgtgtagctcctgtcggctgattagcgtcatcacaattactatacacttagtatcatacctattctagcgtacatggcgccttgtaacagcatgtatgcacccgtgggagttgaaccgccctttgtcacattgacgtgggatgctcgcacgaaggtttcgacaattgatgcaaggctctctccctgctcatcattagcatcaacttagtcaaaggaaacagggatacttacttgctgcatctccaacttagcctcgctaagtaatgttgtgctcatgagagaccacatgtcagtctccttggacttggccttgaggaaatcaaggccctctttctcattacccagcatgccactgttctgaacttcccgcatctgctcgggaaaagccttgccaaagtgatacatccagctcatgcagaagttcaggcagttcatatcatgagactcgcgagcaatcgctacggcctcctgcacggctgatatagcttcactgaaacactcaaagtccgcttgcatgatagccaggttcaaaagggcaaattgatatgcactgcggtcgagatttgcgtgcatggtgtagtcgaagtagcggtggagattgtcaaaggccgaggtatagtctccagccctccaggcgtcaagatatctgtcatttgtcaatcacaatgtacctcgataatgatgtatgcaagaacgtactccaggtaatacatcattacagggactgaagactctgaggtcatgatgcgtttcagctgagccctcatttcatccggaactctacctcccattcctgtgtctgtcagcacatggtcatgacagccggagagaattgcatactctgcagttcaccgacttggaattcgatcagtcgctctgcatccttgacgctgacttcttcctctccatcctcattatcttcgatgtcaccatataccacctgtgaaaggtagctggttgaatccagccccaggtcgcgtagattaacatcaaccgcgatttgatcagcctcgggatgtctgcgactccagtagccgtatgtgggtagacggtatttgacaaatccggcccagagcttcacagaatcatggaactgtagccgcgtgtattcaagataagctctgcgtacgaacgcaccaagtggcgagctcctagacaagcgcatgcgatcatcttccactggtggaattccattatccctgtcatggatcaattcgtcgcgtgatttagccaggagcgacgggatgacctcgccgaagaaggtttccagcgcatccagcgagtcgatggaccagaggttcttcagaaacaagtcccagagtgtacgcccaggaacagaggactcatggcgagacaggcattcttcaagctctgaaattgtcggcaggtaatgctcctcccattgcttatcggcggcatctagtgggaacagacccgccgtgaggaacgagaggacgtcaatagcagaagaattgggcacgacgccttcagtgtagagggtgaccagacacagcaaagagactctccagggagtcaaataacgcgtcattttgcctttgctatggctgccacatcttgctgtgttctatcacggtattgttccaagggcgcgcgtgttggataattgatcgacacctgaggctgcaaggccgcaatgcgggacagtacttgggaaaaaaaagatgacgcataattactttccaactcaccaattgaacgatttcacaatggctcaagctctgacaaccatagatctgcagggtgccttgcctcttgtcgccagtggcaaggtccgcgacctctatgaaattgacgataagaccctcctcttcgtcgcaagcgatcgcatttccgcctacgatgtgatcatggagaatgtatacaacaccacaattgcgtaccagactgcttgctgataccgtctacaaaatagggtatccctaacaagggtgttctcctcaccctctgtacgcaaacgtggttcaaggccctgaaagaggcaaacccctccctccgcacccacttcatcaccctcgacctcccacctcagatcccggaatccctccgccctgttctacagaaccggagtatgcaagtgcgcaagctacgcattctccccattgaggcaatcgtccgcggatacatcaccggctcggcatggaatgaatacaagaagtccgggaccgtacatggaatccaggtccccgccggtctgcaggagagccaggctttccccgacggtcccatctacacccccagcacgaaggcagagcagggcgagcatgatgagaatattcatccagatcagggtatgttcatttcgaatctgttggtttgagatatctatactagatatattacacaacgagaagacctcacctaacatccctcacagctgtcgccattctgggcgaaccctacgcctcgactgttgccaagatggctgtcgagctctacaagacagcccacgagtacgccctcgcgcgcggtgtgatcatcgccgataccaagtttgagtttggagtcgacgaggaaactggtgaggtcgtgctggctgatgaagtcctgacgcccgactcctctcgcttctggcctaaggaatcttacgctgtcggtcgcggccaggctagcttcgacaagcagttcctgcgtgactggttggtcagtgagggtcttaagggtaaggagggtgtgcgcatacctgatgatattgcgcttaagacggcggagaaataccatgaggcttgggagaagctcacgggtggtaaagtctaagtatatgatcaaggcggttatggaggggtatatatgattttagtgtagattttgtatttgtttatgattgattcgagacgagaatgaaattcaagtgtcatgtccaaattgtggccctgagggtgtagtgggaattattatacacatagttttatcctgtcctatatttactcctcccattcagacttcaaccccttgagacccttcttattcgaatccccatcctgctttttgatctcttccttgatggacttcaccttggacttcgcctcgggttgattagtccaaccagagctaacaccctcatcaagaggcagcgcataatcaccacaaatacgtcgctcctcttcaatctccgcctcactgatgccattcgtggcccaaatcttatgaatgcgtagatcaaagggaccctcaacacggtccgtaagaccaataccaatactcttaacacgctgccgagtcaaagaagtctggggctcaatgacaaagccgtgattcgtacgcacaaacgagttgaaaggcaagagaacggtttcccatccatttgagccagaggtcgttgtactggtagaggtagaaatgatcgtcgattcaggtgggacgtctgaaagcgcagcgggcaagccgctagggtatagctcctcgacatcatcgggtgagtctgcttggaagtcatagtcctcctccgattttggtgtgtcgcgtaggaggtggtgtcgcgtgtatagtctgtgctggtgaatatccgtctcgacgaccgcgtctgtctgcacgttgacggtgtatcggcggccgtcggacttgatgcgcagagcaaggtatgcatagggatcaacgtcccagtaaagtcggccgaagagccagaagcctcgatcttggttgcggaacgcggcatagcctggttgcgggtattagttaattttaatctttaatcttcattttcgtgctctagatccttgtctgtgtcgctaattaggcagctggtagataacataccggttctttcgacgcgccagttgtcaggaagcttggttgagatgctaccgtggaagcggacatgcgcgggagtatttgtagaaggttcagcgggttcgtaatctaggctggctgtgctaaagcctcctactgcgcggtcggccatggtcttgcatcctgtaacagtgccctcgttttcgaaatccaggaggacataaggtttagtcggggtgtggagggcttctgtgttccaagctgcgacagattagttgagctgcaagaatgacgacatacaacttaccgatctttgacagacggccgaattcatcggcgctgcgcctgaagaatccggcttgggctaaacgtcgagttggaaacatattggagtaattgtgaggataggaagaagctctgacgtgcctggagttgcttaattagctgtcggcttccgaggtggcgtgaacggccgataagataagtgtttggcttgtttgtctttgccctcaacttcttttatacttcagtttcattgttcctaaagacacatgggaccttgctaactctacattctctcgatcatatacacgtcattatgttgcaaatttactttccagggattcggaatttgggatttaagagtcacgctaggtgcacaagacatcttgaagacttgatcatcttttgtctctgttgagctttgtactcttgttattgaatgcaatgtatctgtcgatatctgacgacattctgatcattccgcatacttcgctaggcacatacctgaatcggttatgatgcgtattcctcttttgggaaggacatccaaagttcatgaccaactctatctgaagagtcatggatcatatgcgcgataaacctcttcatgagggcccagctctgtctttctcctgggcgtccggctttgaaccagtggttggactgactagccctggtaatgcctgattctgagtcaaggtcgctgcataggtaccacctaggcagtcctgcgagggctcccccggaaatataccgtggttagctcatatctactttcctgtgctggggtagcctagttctggaaatcggatatttcgatatttatcccaaaatggcgacggagatggtgttgatagaggatatcccacgtagttatctcgatatctctcttctcttctctatacattcataccacgctcgtttaccgcagttgaaccattcgtctattgcagtacaaacatccatttactctcgttgattatataccgccgcaatggctatgcattacgttgaacagaatatttctgcgcctgtctcttggtatagtgccccggagcctactatcatatggcaagatccccatgatacaggttcggaatctagtgcctttgaatctggtagctcgaagcctagtaccccagagcaacctgatgccaggtcagtcgagccatttaggccagttgagacagtccaaccagttgagctagtcaccccaaaggaaaccaagccaggagacaaaaagaagcccggagagggaaacaatccggtatacatgccgcgtgaagaccgactgaatcaaacaccgaccaagggaaatgcacagggcctctttcttcctgcttgttgtgtctttgtgggaaagtaggtatttctcgattcaatctgacactgtatactgactttgaatagcctctccatcaaggtttctcctgaaaagttggaagaagaccttacagaaatgatctctacatttggccggtgtcatgttaaaatcaaactatcccagggcgtgaagaaactgcctgttggatttgtacagtttgaagtgagtacaactgtttgatacatgagatatatatctcatatggtatactgacatactaaataggacaccaaagcagcaaatgctgcattaaaacaaaatggaaacctgatgcttcataatcgggtgttgagattggaatcatccaaagcaagacgtgagtgttctttttattttattggacttcatctgctcaacaccttttgcatcctgcaccctgcaccttgcacctttccaccttcgcactttctcactttctcaccttctatcttcacaccttctgaactttttgttctccttaggaactgccaacttcggtcgtctctctgatgctcccgtcgaaaaagctgacgtcgttgctgccctgaggggacgtggtagcctcgagagcatagctattgagcacttcgtcaaccaagacggagaagactctacctttggtgttgtgactttcgcataccccgacgattacgcagatgccctccaggtaagtcgactgtccaagtttgctttgactccactaaccacttgaccattatagcatttccaaaacaatcctgattactatatgaccagatccaccatggatcccaacgaccagcttcctcaggattaccctgcaggacacaggtcatctaaccagcctcccgcaaaccgtggcaaccagcagcgatacaacaacactggccgcagacccttccaccgtccatggtatagcggcggcaacaataacaacaatagaggcggattccgaaatgctcctggtcctgcccccagacagcaaaacacatcctttgcaaatcatggtcacagtcaaagcttcaatggccagggtcattcgtctcacggctctttctctcagaactactctggcaatggtttccctcagaacaacttcaaccaaggctatcccagccccaaccccaactacaatcaaaacttccctggcaacaacttccacccaaactatcagggcaacttcccgaactaccccaatcaaaacttcgtggctgcgggtccctttcccaatgcgccagttctgttcaaccaaatgcaaatgcctgaaggcccacccccgccatatcatgccgagtacactgctatgcaaaacccaggttttcccgtgttcttgggcaatcaatcataccagcctcccaatactcttgcaccaatgatgactccagttcaggctgttgctggtcctgttcctggcgctgttcctggcgctgttcctggagctgttcctcgtcgccggcgattgccccctcgtccagactgtcccttgattgtctccagccagcctcaatttgacaccgaacagcacctgcaactctactatgagccctatcccggtaacgaacccgtcgtgaatatgcagccaggctggaccggtcacacttgtttcgtgcagcctgactacaaccagccttgcccgcccgacgcatatcctcacagtcgccaatctagcatggaaagtcagcataacacctgttcgccgcccagggtcaatgaatccgagtcaatcttgacccagactaaatttcacatccctgaggtcgagagaggtcgcccactagttcggccgcgccatcccaacaccgatggaggctttgacacggctccagtgtctgctcctgctaaggctcagagagactcatcctctgttaaacccctggatgggtcctcaggaagagccagcaagtccactgatgctcaggttgagcccgctcttcctatgagaaagcctatcaagtccgagaacaaagccaccgaacctgagaccgagctcaacccgcctcagcctgaatccacctgtggtccgagtcatgatgaaaagaaaaaagaattgatggatgaaatcaagccaccgttgagcattgataccaatgaagaaagcgcagggtcctcctccgaggccggccctaagacaccagacacggagcagtctcgggaaagcgctaaacttcagactccagccaaagctggcttggtgaaatctgccggtagtaagacccctgatagcgctgaaaccctcaagccagccgacaagggcacttcggacaaaggcaaatctccggaagtggccacatccactccaaccaagagtggcagcaaaagacttgagcccgcagtgccagacagcaaacatctactggctcgccatgctttccagcatcgcaaacccctcaagaaaaagtaccaacccaagaccgacaccggcaaaacagttgagcagtacacccgtgagataaatgcgcagcgtgcctcggttgacccagactcgcgtgtccctgaacatattctgcaagaggtgatccaagagctagagaatgagcgcagagaaaatattcggaagagtctcggtctcggacccagtgctaaaagtagcatggacagtggtacttcgaagaagaagtaggtgatattgcagtgatggaaattatccaattcgattttcttactatgatggggcgttttattattatctctttcttactcttttgtccatgctggctatggtttgttctttctttattcaatctgtgtgtctgcgtttcaaggaaaagaaaaaactacaaaaaaaggggagcatggacatgctcaagtcaagtaccaagtatcaattatcaaatttcaaattttattctgcaaccttgctcattcctatagtaatctaatgtatcgtattagttctagacaggggtggttctgattctagccatcagccctatgtggccgtgagtatgaatatataaggtaaaagaatgaagtagctcatcgatgataatatgataatatctgagttgattgatatgactgacatggccgaaatggccaatatagcaacttgatccccgccaatgtaaacgccgagaccgaaagaaagccggtttatatacacaaaatgcttctcgatgccagattgcatgccatagataccgaaaccgaatgccagtgggggataatgatgcacgccgaacagaaaaaaaaagaacaaaaaagaaaacaaaagagcaactttccttatggaaacgctgatggatagattagatgtgggtcgtgaggatagagatgatatgtatgctgtgatgggggtatgaggtagacaagtagagaggggaggggaggagcggagaggagcggagaagcgatcagatatgaagaagataacgctgggagtaaaagaggagagattaagtatgtataggagtgggaattagtgcatcaagctctcacccgcctcgcgtcgaagaagccaagattgacggctgtgtcattgacgcccaggaacggcgccgcatcctcaagtagttcccaaggacggacagggtagggaccggcaacacgaccgcggcgttgaagacgaagtcgactggccatgcagttcgagtcggactgtccggtaggcaagcccggtgctgctgcgacggctgttgaccccagtcctgccggagagggagctgagacttgctgggaatttgcagggtattgttctgaaattgggcctaggaggtagaggaagcgagagtcgttctgaaatggagcgaaaaatggacatttctctttcaggaaccgtgcacactggtggcggacttcgtctgggaagatgtcgattagcgaggcggccacgtcgagggcgtgggtctgtaggaggattcctggacagggacggaagccttcggccggagtcggatgcgggaagtaatccgctgcagggaacagacgaaggacgtctccagggaggctcgagagtgcgatgcagaatattgaggtcagaagacggagctgttcgtgcagaggattgatcttgagagctggtggcggttgggcgaatgcggaccgatggaggacgatcatcctcagcaaagcagagaaccagaatgcaagagctcgctcgaaatttgcacgagccgtgttggccacacccacacccctgagggtactgttgtgcagggtgatgatcttgtggagaagggcgtccatcttttccacgagcactggagcgacagatggagctccagaatcggggatgctactcgcaagctcttcaataatggtaagatacattttggcagtctccaacgatcccagcttgtccggcaaatcaggaatatcacctagtggctcttcgagcagtgggatggagaagaacgccttctcggcacgttcccggatttggcgtacggcgtccgggctcatcagtgcaaccaggtcaatccaatgaagtctgtgagcacgacagtctgatacggcagtcttgaacatggcatcaacaatattggttcggtcttcagaccctgagtccgcatgaaatagaacttggagcttcaactggcaaaatggaagcgagaagtcatcagtcatacgggcaagcttttcaaccttcgagaggactgatttgccgtcggactgtgactcgatgcccagtaaaaggtcaagcgctttctgcacaacacccaaagcggctgggtattggtcgatgagcttttgcatgctattctgtgccgcacattcggggtgtcgcacaagaagatcacgtaacagcatgaccatagagtgctccagctcagtgtgcccggtgaaagaaccaacggcattggatgatgcggcgtcgcaaacaatcttgagcgcttcctcggagtccttattgagaaattcctgctgtgctaactggaaccgataggacaccaaatcaaaggacttgctatcttcaccagagacaagaagttgcacaagttcagcaggcagttgggctgcattagggactattgctggcttagagagtgcgagtctttttgcaagggccaagaaagctctgatagtaacgcatccgacaccaattagcggcgggagaattcgcagcaatacggtacgttccggagatcgcaaatgaccacagacccaacgggcgagcatgccatcaaaatgctttggatggaaagacctgagctgcgcgagataacggcaggcgtcatttgctgacaggttcgtatcgccattatcagactccaaatgttttatgagtgtagtgaaaatggtgtccagagtgggctcatccatgacatttcccgaatgcaaaagctgatctaacttctctcggaagaaggaatcaacgccatcaaaatcatctggaatgtgatccgacactggagaagatgcggccaccattgacctgttctccatccgagagagatcctggcgaagaatggatacagtattgagttcactcgggatgcgcaaaccaagttcaatcagagagaatatcagatcaagacttggcatgccaaacctcttcattccagcgtaggcatcaatgagtctccggaatagatcagttgtggcgccaattatgcaaagagagtcgaaatggcagtttgtggtatctgcaaccgaggcgagaacagtgctatcaccacaactagatgcaaacttcaacacatctgctaacattgaaatgtcgccaaatgtttcaagagcatcgcggacagtgtaaaactcggcgggagtcagcgcagacaccacagaggtattgccaatgggaaacactcctctgttactttagagttagtaagataattgacgagattaggaggaaaaagcgaatgctcactctgtgctccggttgtgttccgcaactgctctccgtaaccactggccaacatcggcttttacagcccaaggcaagtttgttggtaatgattcgaattccattgacgtagattcctggacaccgaaaattcccggtagacgttggctgatgatgtctttcacgctttcgatagctgcgttctctcctgaagcagagagcccagtacgattcagcagagtactccgcaagttcccaacatgctccggaagacgagcaacagggagttgcgctatcagtccgatatctattggtaagttcttcgcctgtaaatctgttagtgaccgaaacagtttgatctgtaaaatcgatcttaccttgggatcctcggctgaagatgatccattggtaacgcctcgtgccatgagccattgaagatagcggccaacagagaatgtctgtgacctgacaagttcagagacgacatggtagatttgatccacgttgagcttttgattattctgtccgctcgatagaaaggccagtatgtgactgtctacatcgacgccggccaatttccatttacggagcaggcgaacaccaatgtaaacccgacagagaccgtagcggaagggcgtagaaagccattccaataacttgaagaccaagacagccttgtcatcaaaagcgttgagatagtcaaatatagaagggagatcatgagagaagcgtatggagtcgagtagtcggacgatgtgttgatggggtgagcgctgggttgtctgtttcgagtgtctgggtcgttgcactcgcgcgttgcgctccgcgaggctctggaaaagagctttttctgcttcgttacccaaatcaagggcagataacacctgttgtttatacgtatcccaagaatttgggagtatcatcgaggaagtatggtcaagaacaagctttttgataaagcgaaatagacgatcgataagaggttgaagctgagtcaacttagcttcagttgcctattgctaaatgtcagtattggcgggcaccaagtagttgcaagttgaacacacctgtcgcactttgtggagcagcagctcagctaatcgtcgtccccttcgccgatatcgcatgatatttttccaatatatgccgagcatcaaaagccagattggaatcgtgacgatagaagcagcctcaaacgaggacaagaaccattcaaggaaatggtcatggtccagtaaattttcggaaaataaacgagcagtcaacccgactctagagataaggttagcatgctcatagtcgacgcaaatccaagggcacgtacgcatatgtcatcttcgccttccaatccggagacttggtggcagtacatactccttcaacaaattgctggacattcgtcgtccagtctcggacccattttgcctctaacccaacagccaaagcaccactggtgccttttcgtttgaaggcacgaatttcattcgcacccacacattttgccaaccaaacagcacgtgcaactggaatacatttaccaaggcactggtccaggaggaccttgccacggataccatgggggatggttcggctcaacctccgcagtggaacagatgggttggcgagatctcgaagccatgcctcacgcttattatcggtgagtgtgactcgaggcggcggtttaaaagttgacggggcgtgaatagtgttgtgactttgtcgtttctctaacgctgcagcgaagacggacgaaagcatttgtaaccccgtgcgattcttgagctgcgcatataaggcaggacgcgctgtattcgattcattctgcgagacttgtgtacggtcataatacccttgtttcgtggtttgctcgctcaggacgtcctccggatggtttccggtccatggggcgaagtcggcgggttctgtaacggacgattagtctccatagttaagattcagggatctggggtcgaattactgtgatctttgtataatggtgcgacggcagggatctcaatgcgatacggggtcgtttgtacagccccgacgggggagctttccctcgacttcacagtggcgcttccctcaggctcgggcacaaaattgttcatccatggctgggccggtaacggaggcggggacgggggtttcagtgcagcgccatcgccccgattctcattgctcgggatttccgacacgagagcctggaaggaccagacaggacggccgcgccacgaggctgcaggtcgcgagattacacttccggggttgttcttcgtttctcccaccgctaggccagtatccgacgtattcgacctgctcgggacttccagtctcggtcttttcgggggcggttctctgtcttgcgactcgggaccacctgcggtcaagtcaacgacggcgggttgtcgaattggcggttggggtagtgaggctgacctattgggctggtcatattgtcccaacatctgcgcattatcaacacgtccgagaccgccattgaaggttcgcagagggtggccccacggttggccgccggcagaggaatgggggatcatcttaggttcatgatgtatccaaagggaggattattcgggtcatccaggcgatgttcggtttcgagggattcgagtcaatcttggaaaatgggtgtaaacgcgcggaattaggtggaagtcgggttagggtgagctgatgtggaatcggggaatggccactcgggtatctgggtatctggatatctaggtatctggggttgatcggggaaaacacacaaatgctaaatgagggaaaggatcaatagggttgtacggagtcaagtacgactggagaatatagtatgtactctaagtcgagagaagtgcaagagttcaagcgtccaaatgtttatcatatgatttgacgggtaatgggctgacaataccaacgtggacctgcactctcgctcatttgcccttttcctgacaatcgcaatatctcgggattatttcctcttttcttcggtctttacttggtaaatatccgagtcgtttacgtacagcgctgacatttccagggcttcttattgcctatatcgttttgccttctgtcagtccgtccgctcccggaaatcgccctatctggtgatatgcctcgccggcaagatgtcttagccgcgcgattactcttgaaaccccaatgtggactattgaggactgttggaatgaacaatccaatgccaaactacccatgatctgtcacaccgtaagtccaacgcaacgggccgttcccattctctctcggtaaatccccgaggctttccaaatggcttatcgccggagctccatgacccgtggacattccgcagggcgcgtatcgggtctatcgggtctttgcatctccaatttccaatttgactctgaacccgtggcatgtttgactcggggcttaaaggcaatgcatgtgccgatgtatacccatgtccattctatgaaacaacagcgagaactagaatatgctaactgcaagggattcgttgtaagttgtagactacggagtccgctgtaccttgttatatatgttgtaggaagtgattaatgcacagccatcacacttcatgcagcatacatatctagaccatgacacaaaccctgtatgatgtcggcggatttttattcgtattatcttcggactattccatttaaagccatctgaatgactctatttcatatgaatcgcacgtatgttgcacattgtacattatagcgatatgtcaacaagtgtttatctagcttgacatattccgatccctacgtacttatccgttcagagaagatatggaaaatacacatgcataaaagaatgaagtactccgcacacaaaagaaaaagcaaagaggttgtccatgctccagctcggagatattcagtccggggttgttctcggaaagtctagcccagactggcatcgccttggcacccgtggccgaccccgggggggccagttcgatccttctggttaactcaacccatccccttgatatcatatcccaacacaatgtcgtcaaagaaagatatgcgcagagctgatctcggtgagtggaagaggaattgcttcgagccttggctcatcaaaactaacgttgaaaagtgatcccctacgtcgatccacccaagagcagcagcgatgcagatatctccagtacgcaccatcttcgttgtttcgacaatggcacgcttcagtgcgaggattatgaaggctgattgagctatgcaacaggcacaatgtcgagcactatgcccatggcggctgtaagttgtggcccaacatctgaccttgcgataacttgaccctgacctcgatctttcagatgtttactcggaaccggtgagtcgcgcatcttacacgagttatagacagtattgacgaatgtcgcaacacagcatgatcggatggtaagagcaaggcgagcagtcaatggtttggctaggttatctgactcggaaatagggtatccttcgtcttctcacttcagtcctggctgggtgaatccgcagagcagaagaagactgcttctacaccggcctacatgtcggttctcatgtcctgttcgtttctctccgtacccctcgtgtttgcaggactaatcttatggcgcgttatagtgatggcattggttgtcgtatgttttccgaacccactaaattgcgatgcgcccagcttaacaacccctttcagacctatttccctctcttcttgcctccgcaggctccagggggcaccaccggtgcctccgcaccgactccgctggcctcttgaacgcccgatcctccttgatatccacccacatacctatcataatcttcacgcagtcttatcatgtgaaatacaagaattaattgttcgcgggtcatcggattccaagtccggattgagagatctccacggttatctattgctgtcacgatgtagccatattcaagccgagttctgcccttgtgatcaggaatcagcctgtctccaccatagttgccaccaattatttgctagtttaaaatagatattgtatatgatttccccttaatatgtagttcttgcgcgctcctccaggggggcttgatgcgcgagaatcgcttagtcatacaccgcctaccccacaacgtgacccttgcctcaaaaggctctgccacttcttctctcgttcttcaaccacagcacctctctcctaaccacgcacgctccgatcttttacagagatattgaatctcgtccttcgctcactccatcaatacccattttaaacgccgtttactacgaaaaggccgagtttatgtccatcgaaaacctcaagaccttcggtaagttcgccaccattcccctcctgagcgcgtatcgggcttcaacccccacccgcacgcatatccacagctgtgatgactatgtatgcggatggcgacatatgcctttcgtcatgtgtagtgcgcgctgtatatttcagctctccccgcctgtgttgcaccgagtctcacgacggcgggggagagatttgatactgggctgagactgacatgtgcatattacagaccccttcgccgaagccgacgaagataccggcgagactaagcagtctcagaactatattcacatacggattcagcgtacgttcactctcctctcctcacctcctgtcctcaccgcccatggctgctcttgcgattgccggcgcttaaagggggggcacatgctaactccttattccacaacagaacgcaatggtcgcaagactctgaccactgttcagggtcttcccaagaagttcgaccagaagaaaattctcaaggtcatcaagaagaagttcggtatgtctcgtgacctatgcatacgtatgtccgggtcaaatgctaactatatcctagcttgcaatggcaccatcgtctctgacaccgagatgggcgaggtgattcagctgcaaggagatcagagaaaggatgtccaggagttcttgactgacaaggaggggctcgagcttgatgccaagaccatcaaggtatgtcgctgccccaatacgtcctccgtcaccattaccagttctaatctgtcatattttaggtccacgggttctaatcccatcaccaacatcatgcctcgttcccgtcccctcttcccggtttatgttgccctgtgagcggtgggataggaagcatcctcatccgccggccgtatacaatatacatactggccttcacatcgatcgaatgtcttgctttctccccccaccactctgtgcctggcgtgttagacctgggcccttcgtcgacatgacccgctacaccagtgtgcccccgcctatcgttgtcacatgattagcagggagcggggtggatcgactgctattttaggacgggattatgacggaacgaggagttggtagatacccaatatctgcatagacagacaacattttttttatcggcttgcgtgttttccattcttttatccctggagaaggggttgcctttgcttgtattgctaattaccattgcattcccatggtcaattttgtcagtctggctaatcgaggagatccaggttgaactaatggcgtgctattgctgaatcgttttctcggtctctaccgtctacttttaatatttgtgctgttctcgctctttgttcttgcgacaaggaaattgaactgttctcgagtatcatcctccagctgatgcagcaacatagagtaaattcgagataggaacttgctctctcagtctatgtttaagagggtgcgcgttgtgaatcaatcaataaacaaaaataatagataagatctatcaaagatcgccatgtctgaaaagaaaaacttccctaggccaggggtatcaagcgcaacaaagtactcttccagtacttttgctaaatcaaaatcacaatcagatcccaaaaatgtacaaatcatgcagcctgccagccaataacgcttgcccaaactgtggaaaccaactctgcagaatatccggaaacagaaaaagcaacaaaagtccaacaaccaacaggcaagtaatcaagctatagctctcccataggaatacggtcatccgcaattcgcatgcgcaggaagatggccacagcccagtcccaaagtttgcgggtaatgacgaagacaggcacttctggttcgttttcacgggtcagatgcagctgcatgaggagcgaggacatgcttaggaagcttgcgacggaaacgactagtagcgatgctgctgtttcgcgtttgatggttgcatggttttgcgttgcgtggtaaacaaatgttaaagactaggcgaagggtcagtggctgttgcaaggtcgatgaacaattggaagtcaatgtaacgtacggttgttatggagatccaggctggtaaaaggagtctagggtcagaggatgcaccagataggtaaaggacccaagaagtgatatatgcaatcaaaccgttagttgtaagaagacgaatcacaacggctggtggtgtgtagtttaaaagcctgagtatatcacagattagcattatggacatagtgggacgtcaagggttgagaaaaccaaccaacgggacatcatgcaatcagcaaagaaataggaaagatatgcggatgcacagcactgtcaagtagtcagtataagagtaggccgttggaggatagcatatcaagggaatacatacccacataatagccaatgccacctctgtcacacgaaatctcctctcaacatcccattcctgtccaacactaccaacaatcgccgccgcccacccctctcgtcccatacccggccttatatgcagcaattcggcgaggaaggtaaaagcgcatcgcaaaccccaccaggcagcaggaagcgtgctcagagcccgacataccagcaggggaatataccacctgcggtccactccgaggatgacagcaacccgcgggtgcagtgctgacttggggccatcgctgctgggtggagtatgggacgaggaagtcggggaaggcgggacagtcgaagcagatggagaagccacctctttaggcagtcggctttgtagtagttcgggggaattgctgaggtagctgggcggacgagccggtcgcgtgagattcaggtctggagcacggtgtggatgttgtggatagtctcggggggtgtatggtggaggagaggcattacgtcgaggaggagccagcctttattctgaatcgcggcatatgcggccgccacgcaaggaagggaaggggtataggatgagtattacaatcgagtcgtgagctctcgacaaaagattcaaaattgggttgttgtcaagccgtttgcgagtcccctaattggcagatatcagaccccagtgtgtggcgggcggtgtctttttcggaggcagtttaattttatatgctcgacttcgttttacatatgacagtgggattgaagaaacagcgaggaagatataagctgtagcctcgataagagggcgcttcgttcacaagagtcccggggagctacttgttgctgtcgaccgcagtgattcacgtgactgacagttccgcgggtttcattcttcggcgaggaaccacttctcttactcaacctgcattgcaatggcgtctaccataagattgcccgcgggcacatccgctcggattgtcccatctggttcctttgtacaatgtcgggccttctccgagacctcccaacaatggcgtgggagacaaatgaacttccgtcctccaagccaagtgcagcccgccttcaaaaccagaacccagggcatgagaatagccgatctgccaaatgatatcggcatattaccaggtacctttgtccgaccgttgtggagggacatgccttcgattttcaaggcaccgcgtgataggtggcatatggaatggacatggctcaaggcctggctgagcaaccatgccaggttagttatcctcgaattctcggactgctcggtacgctctggcggttacgctgatcaagagctgcttatgctatatacttacaaagatgtctttcctaactatattccagtctgctccaatactgcaagcgcgaaaatacccttcctcttctcctaggcaagcggcgccatttcgccgcaaagcttcataatgatgcgtttacagcatttgccgagtaagcatgagtcttttctcccgtttaattttcagcgggactaaccgctatgaattgttatagaggcaacatccctaaaatccgccagatctgctgcgacaatctcgccaagaacctcagcacagctatcgaacgccgcccaaagaatgagcatttaacctggaaactggtgaaatacctgcgtaagcccagcacaaacttcacgggtctccgcgtcatctcagatcgcgcaacatccatccccgatatcccgaaatccggcattcgtcagattgttgtgcgcatcacgagccgacaggccacgactcggacccagaaatccagcgggaagggacctacagaagatgtcaccgtcgacaagaaggagcaggactgtaccgagcacgttgtcattcagcatctccgctggaacaaccaggataagggctggagagtctggggcaacatcacccccaccacattgcatgatgcttggactaatccctacttcatgcctgggttgtcggccctcgagcgtctggacatgatcaaggactcgatgggcaagaaataaatttaagtcgcatctcaaactgtgatttgtatttctttctgtcagaatgatatctgcgcatttggaagactgcgactataagatccgcacagacgagactatgaccggccaagggttttctgacctaccatttcattcgatcaacagcgaatgggtttgacagaatatcctttatttcaccttcttgtctaacaactcctcgtttgggcctaacattggatagaggctcaggtcagcttctcttctggtccgttctcttcctcgccacggaaaacccttgatatagaagcatttacacctccctatgtaccatagccacctgttttgataaattctacctctttttgagccgttacctgtataaatgaatatcaatctctcaatctccttcctgtgacctactactttccctaccatgtactctctggatttaagcttctttggtacgattgccctgactctagaacaaataccaccaagaatatgcggcgtcctactactggcagtatactgtatactttctaccaatgtaataccaaatacgccaatatatgcattccaacctgacatcatcggtaacacgattatacgttgctaaagtcaaaactaaggactagccaggatgtatatatacaatcggaaggcacaaaagcagtttttaacgtgtagcacaggtatcactccaagaacacaagaacaagaacaagacgtacgaatgaataagaaaaagaggtacaagagagcaccgggaagcgacgcatcatcaaaacattatacgtgggtccgcggaccaacgttcatatcccaataaagaaacaataaagaaactaggaatgggccgggggcgaattgatctaatcgtcgtcgaagatctggaatgtgttattcaggatcgtctcgacgacacggacttgccatgcagcgtcggcgatgctgccgccggaattagcgcccataagggtgggtctatagcgagagttagcgagtctgtatctgatagcatcctgtttatatatgtaggatgtggactgtgcaaggacatacccgaagcaaatggctagattgcccgcgttcatgcggttctgggtatagtgttcttggatcttgttgagatgctgtaatagactgtattaatatctgatggaaatagagatcgtgttcttggggatcgtaccagaatgatggcccggagagtagcatagtgagcatcgggcagactgttaataagggcgtgcatcgagtctcggcgttggatgtcatcgtcgaagcctgtggtttcattgtcagtttctcaatacgggattctcttcatgacgtgaacgctacttacgggcggcatcgacaaactgctgatagaactgagtagtgaacagagggtccggaaggtccctgaagaattgcttcacaagtcctgcaacactgttgacatcatggtaaaagttctccgggtttgtgaagtcgacttgggatgagtctgttcatgtgaaattaggttagcaagctgcccatctcatcaactgtgcgatcaagcttaccattgtcaaagatggctttcatgtgactgatatgattagcactacccgagagtcggtagatgccctccatatccagaccgaacagctcaattgcttggaagcactggtacacaatgaacggaactgccgttccatcccgggcgtacaggtcgttcagcgaaacaccgaatactggcttcaacggaggaagatttgattggagactccggtccattggaggaggtccggccattggcaccggaatcatgggtgcaggttccggagcagacggtaccgacactgggtagggagctgtacccgctgggggcggggtgaaggtcttctccggctggggagcataaggtgtctgtggctgtggcaaccgatcaccgctctgcggtggctgaaccaccggcgaggtgacattattcgaggtgaatgccggcagtacggttgacccgcgcctattttgagtcgttggctgcgaagctgccgcagacgcagaagaaacagacccaccaccaccgagtgtctactcaatgggttagtatcgtgaagcaatcgagggacaatgcaggacttacagggtggcgctcgtatttgacaggttcggaagccacagcccccgggttgccttcatggcttaaaataaactcatggagatctttctggttatcgacttggcgaacaacatcggcaaggctcttaagtcctaatgccccgctcgcatcggtcttcaatgggctgacgcaaagaccttggcccagaagcagtttctcgctgaaagtagctgcaaataataagccgatgaactgaacaagaaagccacctacgtaggaaggaattgcacataccaaacttctgctgctgcagggtcaagcccgagtcacattcagcgatcaactgctgaagattgtgtacagcctgaggtcggtgcgtagacaccagctcctggcgcgccgtctgcgccgcctgaaccttagacccataatcgctatccgcgtgctggaccttgcgcaacagctcctcctcgtgctgcgccgcagacttgtggcccttgagaccgaactttccaccctgcttgtctcccgtgcgcacacggtcatactgctccgccaacgactcgtacttggcctttgccttctccgccagcgattccgcatcgacgactttcttctccgcagctaaccccgtctgtttccattgcttgcggccgcgctcgatgttgccggcaagctcgtgcaggtcgtcggacatctggtggagggagacggcgaattggaggccatggtcgaccattcgctcctggattcggtggatgtccttgtagctggaactgtacgttccttgtcggttgtcggtgcgttgcgccacatcgctgatcacgcgggacagttttcgcagcccctgagcgtgctcttcttcgagggagcctcgctttttcaggaaggttgagaaatcctagtagatattgtgttagcattcgcgatcgtcgcgggagtcctttcgcgactactaaccctggcggaggccacgctttgcttcagccgtgtcaggagtgtggttatcccgatctactcatgattaatataattgcgtctttgtttagtatgcacctgaaggtggattctttgtgtctgctcacatcagagtagataactttgtctaggcgggctttcagctcgtctgagatggcctcgtgggtcggctgggtctgctcgcccccgtggctaggggatgaacgaccggcgctcgacggaggcgcatcatgcgttaacgtcgaatcgtgtagggcttgatccgacatggaaagggtcttgactcgtgtgaatgtcaagagagagagttaaatagaggggggtgggacggaaagcctcacgggccactattaatggagtggcagatcaaaatgaggtccaggcacaggaacagggaatgctgcagccttctgcagtctcaattgggctgaaacgtggtgaacctggcggaatgtcttagtattctagtggtgttcttggggtcaagacgtaattgcgggttcggccaagtggatcttgggcttcattgtacgtatggagtgacctcagtgtacgtggtatggtgaactagtgagctctgcgtatttacaagcttaatacacaggaaaaatcacttttattctggtatcgtcgctagaatcaaatatcaacatatatacaaaacatccatgccagtaactcgcatctacaaaaccggaggtgcgacgaaagagtcgggaataccgtcaaagacccaattgagagaatcaaagatttccgagaacccagattcgctgaaaaatgctccgccttcgtcaaactgagctggcatcatcaaagattgatcctccagggagctatcatgttgccgcgtcatatgtcctgacggacctagtatatcttgattcgctgctatggcggcagctgcaaaaggagattttgttaacagccgggataaaacaaataaggggggaaaaagcaaagaaacttaccttgcatctcttcgaggcttctcaccggtcggaaccgttgtcgccaacgccaaaccgtgtcgtacacatgactcatgctcatccggcagcggactttaagctgtagggcatcttcttcggcaggttctagactcgtggcattccacatctgagcgagaatgtctgcaagacgaatgggacggtcgtgatccatgacacttattcggcgaattgctgagatcgcgccgttgaacagtagcttgccatggttgaaatcgaggtgtctactgaagctgctcttcaacaatttcatcagagcgaaagcagccgacacaatcatttgaagaatatagttggtggagtgaccgatcaattcgcctggcgatgtttcgagatctaatactcgactaaggaaggaggttgtcgcaaggaaaagcttgataagatcgtcacttcgcgcagtggatcctaaaaacatgaaatatcggaagtgtagttctgcagctcggagatggatcgtattgattgcttggaactagtgtcagcgtgccaaattggaaagatacgagattaactcaccagagatctttccttcaaactcgacatccatgtctctgagttcgcattccaaaacctgcacaaccacgagcttgtcggcgctaataaactccccaggttcgggtttactactgtataacgcctttgtcacccggtcgcagaacttctcgatacgcaaccgaatgaccaggtcttcaggaagtcggtagtcggcgtccctcaaagaggcaggctcaagggcccagtcgtatattgtactcggtggctggccgtaaccagtcgcaacactgccgaatcctaaatcagtctatgacaaacggccatataaaggaaacacccacttttgagccacgatgttacaaatgacccacgtatgtagtcgatcctttagggcttcaccttgaacttccatgcggaaagttgtgaactcttccgcttgaaccggacggtgtagcccaagctgcatggcaatttgcatcatcaagccactgagcatgaaggttgcatcggtgcgctggcttgtagtcggaagtggccatgtacacagaacgcaaagggccttgaccacccggtagtcttgcgggacactagtaatggttgcccaaagcagtctgctgaatggtccggacagtgcgctcaagagcccaggctcatattgagaccgtcgactcgcaacacagatcatagtccacgccaaaagagggcatcgattgagatacacctctgggggcttgggtggattcaaaagaggaagaaaggggtggtaataagtgaagtatctatacagatgtcaatcatagaaacgggccaagtaaatgggtagtgcatactgttcgaataatcgaagaactcgggctctagagagagaaacatcttccagtcgccattggccctcatcctgtgatacaatagaaccatcccttttcatagtcaaaggggttgctatagttgaatgagattcaattggcacggagacaggtcgagattggtcaatcgcggccgagtcacggcgagcaaagacatcctctgagcaatgggacatttcatcaccaggctcatgagactctacaccttgctcttgatctgaattgggtcccagacggcggcggagatcagcaatctccttttccatttcagcattgcgcctgtgaaatggagtcaataagatgagagagaagacgaaaaccagacaaaaaaagttaccttctcttagagatgcgcttgaacgactgttcaactttacagtctatcccaagccggcgacagcgcgaacaggccgccgctggcgtttgaacaatatcacaccgcagctttcaaggtttagagacatcagcgcgattgtcggagaccggatgcggttggggttgattttgggtaaaatcgcatagtaattatatgcacatgactcaccttttgctgcttacattcattacaggcttttcggctgccacctcggcgtttgcccgtgacaggcggagccttctccatctcgcaagattccgagcttgtctgcatgaaatcgataaccgggggtggccggggtagagtgggggaccgaaagtcggtcggggggattgaatagtgcggcccatccggtgccagtatgttccgataccccaaatccatggagatcagcctgcgttcagccggtataaaaccccacgaaacgtgaacgagtgctcgcggagtccatctgccgtaaatcggagaaatcggcccgctgaaggaggatgtggggagcctgtctgccgattgaggacgatgatttgcgggaaagttgacgccgagacgaatgtcggcggttgctgagtcagctggtgcctgaggcatggatgatgtaatctttccatgatcccaagttttaagttacctagtcaggtagccctagagcaggttgagctgagcacgttgttaggcataggcatagggttatgtattggatagatacaccatcttctgcatagggattatacttcaaagactagccaattgctactaagcattggagagttcatagcatccatggatattgccttaccgccagaagtatataaacaaaacactgaaataaacaaaatttaacttatattcaagtggagatcactggatcgaagaagtagtatctagagttcttaagtcatagccgatattccaatagtcaagccttatatatgtggacttcatgccccgcttgccatggaccgaggtcgatgtggattatttgattatatgatctgcattcaatacatttacatatttaactccttaatcctttgtttctgcaagagttatcattccaatatctgatccaagatacgagtgtataagagtgcgttgtcctacagtcctcctgctactattaaccaagactaacaactcaacccaggcatcaatcatgtctgagatcaacgccaccgcaattctcgttccaaagcctgagaaatttgaagaagttagcacagccccatactctttgacagtctaataatctaacatgtcgtcatcctctaggtatctactcttgtagccgaagtcatcaaacaggtggaagaacatgaaccggacacactgctttactacgcattcccaatcaaggacaagaatgagattgtgatcgttgagaggtaagtcaaccagcctgtataccgtggataggtcgtctcttggtagctcccccgcatggagaaagcagatgtgcctcggtccaagtaccttgccgtccaagattctgatcctccaatatacaggtataaaaatcaagtggcgatccagacccacgtcaaatcaccctatttccgaaccttcgcagggaaattatccactttattgacgaagccggcggagatcagggcaggtggattcctgagtggttcgaggggcgtatcgcgactgtagttggttgtatctgatgtctgggggtggttgggtcgatataaataggatgcatcaactcccagaatgattcgacattgagtcggccatgtcccgtcactcgtgatcgacttgtcatgcgattggtgcattagtggtggcggcccagcagatatcgggaggtctgtgagatatttaggagcaattcggccctatcagacgaagaaccgacgacgggggcatagagcagggtattcacgaccatatatcctccgtactttgtatattctcgattctgatattctatttagacaccctcagtgtcaatatttagaaaattaagtggagacggactctttttcttcagaaaaagaatcttgaccttggctaggggaactagtccaatcacttttcccttttttcccctttctgcctcttcttcctcttctttctctctatatatgttttgtattgttcttttggtgagttccaaatcttccttctgtctccacacctctcccaccccctcttttcccaagctccagcctcctagcttcttcccttcgagctgttccccccctgaagctcaagctgatattctgaagatacccttgccgtgttgacattgtgtccttctaccttatcgctgccatccccttatcgcccagcccctgttgcaatctgccttgatctggcctgattcatacttttttttttgcgacatggcgtcgggtccggctactcagtcattgaaggtgagcatcggatcggatcagcgatgcgcggcgtgaattgacagtctatctagtgtgtggtgaccggtgatggtgcagttggcaaagttagtataatcccccgacactatccctacttataacattgcaatagatgctgacatccattcctccagacatgtcttttgatctcctacacaacgaatgcattccccggtgaatacatccctactgtgttcgtaccctctgcccctcaatgcgaaaccttgaatcccgaacggatattgattccataatagctttgacaactacacggccagtgttatggttgacggccggccgatcagcctgggactgtgggatactgctggacaagaggattacgatcgcctgagaccgttatcttacccgcaaaccgacgtctttttgatctgcttctccatcgtcagcccgccatcattcgataacgtcaaagcgaaggtacgaacggggacatcccatactctttctagtttcgtgcgactaaccgttcccccgcttctagtggttccctgagatcgaacaccatgcccccaatgtccccatcatcctcgttggtaccaagctcgatctgagagacgaccgcgccactattgaagccctccgcgcacgcaagatggagaccgtctcctacgaacaagccctagccgtcgccaaggagattcgcgcacataagtaccttgaatgttcggcgctgacacaacgcaacctgaagagcgtgttcgacgaagccatccggtgagtcttcatatcctttcccggaccgcttgtggatattcgttttctaactgtctaccacagggccgttctcaatccccgtcccactacgaaatccgggaggaaggcagtcaaatgcaatctcttgtaaagcacgtttgtttggcttgactcgtctccccatgttctcgtatgctacaatgagtaatatagtgttaatacggcgtctgggtagttagaggcctttttttttaattccgccggccgcctctcagtgctgttttgtgatgaaatccattgaccgtctttcttggcgatatttttgtcgttgcctctctcggcttgttcatagtctgtcccaattctatcgcgatgttcttgattccgagattataccatggtcgttctaagttattatttcatgtcataaatgtccactcgggcaatgtttgggaagaaagcacagaaaagaacatatgaattggtatcttcaaaatcaaaacaatagagacatgaagtaagtaatttttggaatacataagaaaaaaaccagccaaaccagatgctcccgggaatgcatggctatcaaaatgtccagctgcctgcagatgctccggacaccttgctgtacactgttccaatccctcaacgagttgagaccgttccaaataagccacgacagtgaaccagcgatttttttgatctacatccggcctctgcggctagggtgcagaccagcccactgatcgttgacagcgctgccagcgttgtcggctgcgccatccaggttagcagcattcgcaccagagccgccagccggggcagccttcttctcgtgcttcctcttgtccttctggatatccttagcctggcgctggcgctcctcattgagcttctcgttcttggcctggatcttggcattgcgatgttcggacttggcgccgccgccaccagcactagaattgagggttagtatgcggctatgactgcagttgcttggagagcaattatattctcgaattgggggtaactcacgtcaactcgacgttcatgcgtcggggtgggtactttccgtcgtcgaagttggagtggtggtacaacttgagacaggtcttcatgcggtcgtagttgtcaaactcgatgaatgcgaaaccgcggcacttcttggggtcttctttcttggttgcgacgcggattgtggccggggggttcttttcaaagtgcttgctcaaggactcatggttggcggagtagggaaggttgcctgtatataggaatatcctttggttaattctgcgtctttggttcgggtagttcatctggattggaatcacttaccgacaaagcagatgaagcgggaactcttctgggcttgctcgccctccgcagattcagcggtaggctcttcttcggtctcagcagcgggctcggtcttctccttcttctgctttttctccttcttgtccttcttcttgtctttcttctccttcttatcgctgtccgccttctcggcggggatcacgtcaatatccatagcgtcctcggagggagcagcaggctcggcgtcggtctcctcggccttgcgcttctccttcttctcagacttttccttcttatcggacttctccttcttgtcagacttgtccttcttctcggacttatctttcttctcagatttgtccttcttgtccttcttttccttcttctccttcacctcttcctgtgccggagcagcagtttcagcgggagcgacaacctcggactcctcttgcgacttgcgcttttccttcttttccttcttgtcttttttgtccttcttctccttcttcatcttcttgccctcgggctcgacgacctcatcctgcacgagtttgcgcttatcgcccattgtgtttgtttggagtatatattgtgatgaaaagagtcaatgataggatgcgaaagcaatcgggacgaatgaaagttcgggtaatttgggaaaacaagaaaaagaggtggagaactttgcagcgcaacgagactcaagctccaaaaaaaaagtcgggcggagagaaaagtgaaatttatttttgccgtgtctcggaaggcggtcaaggcgcttgctgataagcccttgattttatagttcgcaatttatctacttactacaagcaattgtttgaatacgatcattcaagtgtgcatttactcgaatcatatactagtataaagttcgtgaccagcgctctgttagatcagaacaccaagatcttcacacccttcttcaccccatagcgctcacgcagttccggccgagtaagcagcttcaacagcggcatatgcgtgtccttcatgtcaaagatgcctctttgcttctggtcaatgtgcgatccatcaatgacaatgcgctccagttcctccaggttgagagttcctagaagatattatcagcatctgtatatgtaacgaagtgagctatctacagatagcaagcaagaaaactcaccagactcgatcaaatctgagattctggttggggttccagccccgataccagaccgagcacgttgaaggaactgcttcgcttcctccaacttgatgtgtttcgcgaacagctttcctacaatgctatccttggtttggaaagagcgcagtgccctattaaccccaattgtcagttccggcttcgattcattccagaaaaaaagactaaaagttgtccacttaccgtacaacatcagcggctcgcatagcagcacccgaaataactagtgtatgaggggtgccgttcttctcggacgactttgacaggtcggcacctttactgaacgatttgaggaattcggggagttgctcgagctttcggctggaggtgaaggaagaggtatcgaggaatgcggaatctatagattggttaatgtctagaacactcctcgaccttggccgacagaacaagaggaagtatacatacctggaatcgaaagatcactcagttcaacagcagaaagctctttttcgtgtcttttggctttctgcgcaaagtgatcgcccaacaaccggccgtccatcttgccaatcgactcgtcaatgccgtctttgcgtgttgactgatgctcatcgtgttccgcctgcttctttttgttcttgttcttcttctgcttcttcttgcttgacccctctgcgggtgtgcctgcttcgggcttttcttgcttgagagcagcgtcgtcggcttgtctcttgcgcttgttttggagcttattggaaagtcctttgggggcgtttgtgtcagccattgtaagaatagcctgtatgaactcggcaacaaaatcttccgagtattttgagcttcaattagtaaatgcaagtctcgaagacttcattgcgcaaaaaaaaaaaccggctgattcagccaatcttatcgataagaaagggccaatcatgcactggcccgcaattgttgtttctagacgcgacagacaaacatcgacatcctgtaattcaccgtttgcccagctgatctgggattttattgtggtggggatcccttatgtggtctattatattgtgcgtgatatagttgcacctatcttgcagaaaaaaacaagccatgtcaacttctacacccaacgcgcgtggccgtcggtcaccatttgggaccgctaccccatctggggaaacaacattgaccggagtcagtgctacccatcaccatttaagagactataaattgataaccctattatctccctacagcttcaacgccttcctatccatacccgataccctcttacgccaagtcgacttgtcaccgcaaccaccccaggcacccaacggtccgcctctcgatatacaccacgtcctcgaggcgtgggtgctccagcaacgccacatgtaatccgtgcccggcaacaacgagcggcgaatacccctggtcgggatcgccgacgaagcggcagagtgcagcgggagactacattcgatattcttagaaacctgggcaaaggtaagagcttcgccacgtatcattcgacatgagaactgaactaaaatacttgggttgtcctagcgctcgctcctgtatctcaacctatccgatcctcgccgcaggagaagccagagcctatagaggagccaattgatgaatttgaacagcttgataatgagccggaaatcgagcgaccacggttatcattgcctattcaagagtctgaggaagaaggcgatgaagtcagtcctgaaatgaaccccccgaggatgtctctcgccttcgcagaggaggatatggatatgacttaccggtctgtcgaataccctcgcgacgctagcgtcagagaccgggaccgtttatctatgatgagccgagctaccggaagaatcagtggagatttcgacgagacgagattagagagcgatgatgcagacgaaactggtattgtgggcgaggatgatgaggcagaggatacaatgatgagtgggggcgactttgatcgagggtaagaatacaagagttggattttctatgttacaagtaatggctaatatgacaaataggggagagacggaagacctaggtcgcttccactttgatcttaactttccatctcctgcagctgccccgcttgaatatcccgctgacgaagatatgaacgatatggagggtttcgaactgtccaccgcggagcaaccccaagctccatcagacgatgatgatgacgatgttggaggtgattttgggtttggactcgagttcccacccgcagcatcccccagtgagagccccggcatcgttggaggtggattgcgagatgaagctatcccagcccagagaaagcaaaagaagatttcacgacatggaattcctgtcccaaacttgcccgcaggtgtggtaaaaaagctagcgactcgcttcgcgcgttcgggggctggatcaagggcaaaaatcaacaaggccacactggccgccatcgagcaagcgtcctcttggtactttgagcaagcaagccaagatttggctgcgtattcaaagcatgcgggacggaagaccattgatgagagcgatgtcaccacattgctgaggaggtcagtttcaatggaagccaaccagcgcatgggagtaattgctgacttgttccaggcaacgccatattaacaaaacgaccacagtgttttcccttgcccagaagcatttacccaaagaacttcagcaagacatgagattgtccatgcctccatgaataacaaatttcccatgaaaagtaacgctttcaacgccaatgaattatgctaaggtaaagctggaatcccactagattaccagtttcggttctggcgaactcggcgcagtgcctcgttggggttcttccgtacaaccatccacatcatgatggtcgtggccaaagacaggccatacctgcaaagtatgagcgacaatctcgaatgggagggaaaagcacaacggatctaacttaccaggtgaagatgtattgagaatggttgtttctcaaattcacctccgcggcgcggccaatcgggatacccttagcctcgcgatcacaagactcgaggaagtcaggaactagaaacgcaaatcaatgttagccatgaatgagcaagattattcaatataggctcattacccattgtctgctcaatccaaacaggctggctcccgctcttctctgccatctgattgatatccgggaagtagaacttgccctcgtccggcttgttatccggcgtgaacatgtttttcttccatggctctcgtagtaaaccttccacggtcacctctccatccggtacacccaaaggtcggtccttttggtccttcaatttccttgagatccaaccccggttcacaagtacggtgctctgtccctctcgctcgaggggagtcactacgatgaacccgtcctctccttcgttcatgcgggggccaaccagcatttctttgtcatgacggaaatggccggtagcgtacacgcggcggtagtcgaactctgaaatggcatccgggtcgactcgcggcggcagtggcagaggaggtttcacgagacggtcctcgaatttggccattagtttggttttccagcccaaacgctgtacctgccatgttcccaggataaatgagattatagggatcagagctatagtgtagaacaatacgttagtaattatctctaaatatagcatttccgaggatatgtagcattgaacattaacatacccaagatgatcaggccaggtccatgtttcttattaacacgcacaagccgcgccgggtggtctacaatattcagaccatcggccagctggcgtgattgagagatatggcggaattggtgtaggcggtatttggcgcagagggaattgatcttggatggtacacgagggtttcgaagagcgcgagtcggaggcgtccaggccctcgcggatgtcttctgcaaagcagagaagattggccgcatgttgacagtttagaaacgcgaagaatgcactcttaattgacgttcggatggggttggagttgtcgtttctgcaaatgcgacggcagttgggaatttcgggatcggtgaccgcccaggcttctcctatcgacaacattgtatacttgtcactccgcactggcgcttagtcttcacggaatgcgattatgacgattttctacatcggaggtcttcaggagggcattagtgctgcagtaagagatgacaaagtggttacttgttttgttagaggtcgctgaatgttctccccgcatcgaatgacatgttgctgatcttgggacttgaacatatagatgacgaagagttgagctctgaatgggaggaggactattttggtgatgctgaggtatatatactcactaaaattgaatgtcgaacggtatctgattctctacaggtcgtacaagcactccatgccaactcgattgtattgcgcttgacagcgggttcacaggaagctgaactcctggcctctttctctccgatccagaaggtcccgagtgttatcgttatcaagtgcgttcaaccgtccaaggccttatggcaagtcgatattagtttgctgaccgcgttctagcaatggcaagaatcattatatcgagccagatatcacgaaggatgacttccgcactcgattgattgcagctttgaaaaaggaacagacaattcgtcctacacagcaagtacaaggtaatgatacacctacagcttcaacaaataatacgacggtgtcagtcgtgccacaaccccagcgtgaggcgccatccaatgccagcaattccacacaatccgcaaagaaagcaagtgaaattacaataaagaaacaatcaccgattggacaagtaccaaagaaagctgcggaacctgcaaagtcaacaagctctacatctcaaacatcatccaaagaagccagcaataaagactacaaaggcaaagcgccgatggggtctaagaatcccactgccaaaggtgtcgtaaagagtgaacaccaagagccaaagactatagtttctcggggacctccaaccgagtaccggctacaagtgcgcctgttcgatggaagctccgtgcggtctagcttcgcacccacccagagcatccgaaatgatgtacgagcttggcttgatgaaaagatggaaggcgacaaccgaccctacaacctcaaacacatcttaacccctttccctagcgaaactctttccgtcgcccaagaatcgcaaaccctccgcgacttaaatctcggttccactgcgaacctcgtcatgattcctgtatcaacatacacggaagcctattcggcagcgggtagcttgcccgcccgtagtgtctctgccatctacaacttggcctcttctgctgccagcactgcaacgggttttgtgggttcattccttggatatggcccaacggcaccagcaagcggtgcaaccacctcttcggcctctccggctactggcaactctcagcgtcctgggactacgggacccaatattcggacgctgagagaccagcaagatggacgtggggataaccagctctacaatgggaaccaggtatgtgattatgcgagatgagaatatcttgtccgggattggctaatgtctttctcagttgaatttcgagccacggaataacgaggatgacaaggataaatgagtcccagcggtattgcttcggtgttcttgcattatttatctatggcgttgatggatctgattagctcaccagcctctctatttaactatgacactgctattattcacattttggttactgcaaagttggcagtcacaataagtgatcttttccatgaagcctttactggtcctttccatcgtatttggtttttgatagaggtccaaacaatcatcagagaactacaaatattggagttcgttaaattcatgcattcgaattcttgattcagtagtcaggtatattgatccctttatcgaggagaggtggtataaagtacaaagaggggatatggaaatggctatgcaaaagaaagattggctcggttatggaacaagcccataaatctgtgaaccccatcacttattacgaagaatggtatctgtctttctgatcaaaaagggtcaaattggtatcaaccccttagtaaggcttagcggcagcctggcaagctttctgtggtacgattagtatgtattaaaaatgcaagaaaaaaaccgaagtgtaaacataccagctggtcaaggtaccaaccgcagatgctcaagttaccctggttctcatccatgcaagtgcggaagttgcggacgtcaacctcacaagcagggttctcgtacgaggtctgggcagcgttgctctggtagaggccgctgtccataccctggaactcagaaggagcaggagcctgctgggcctcagcgggggcgctggagccgcccccgaagaagccaccgatggcgtggccgatagaggagccgacggcaacaccactgcatcggaataaaccgttagcacatatttcgggagagtcgaatcccaacccgggtcttgtcggggaatggatcgcaaagccgaatctggaacttacgctgcggtcgaggccatctggccgaaaagtccagggccggcgctctgctgctgcatgggaggagcctgggcctggggaggttgagcggcggtcgagtgaggctgcgactgctgctgcgaaggagccgcgggccgagcaggagcggcggtaggacgacggggagcgctgcgcgcaggggcgggagcggaacgacgttgacgagccattttgttgtgtgtgggtttttttggaggaattagaaagggaggtgaagatatatgcaagttgggataagtatacggactagtggagaaagaagaagctagaagatgagtaagttcggccattgaggcaaactccgatgcaaaccgtggagttttctggacgttgattggctgacttcagtcacgtggatcggacatcacggtgccgattgcccggagcggagtcagcaacggggatactacgggaattactagcatgtgctattaaaagagcaaattatgtcataggaaggaccagtcggtttcatctgcttgtttgtgcatagagtatatcgcggagcttgttgcagctcccattccgaaagggtatcttgattcatggagacatacaagtctcgtacatagtacacagagccactcattgtggtctcaaaatggccgagacatccatctgaaggaagctcatggccgggcatgcttggcaaatcgattgctagattcgacaatgcataacgtgtcgacagaattccggtagtggtgaggcatagccaataatatgctttgggaatgcccggcagtccgttcttagggttcgaggcgcaagccggtccgtactgaattctcactaagatcggggtgcaatgcactgcactcattgcgcttttcgggccttccgagcctcctccttcttcagccgtcgctccttcttcttttctttcattgctgccgtgttgattttcctctccttctttgccttgctgtcttccaatttgtgttctcctttggatttcttttggctatccttctcggtcttttcggtgtggtttgtgtcaacccggggctctgctgctgttgcaaggtcgacgcccccttcagaatcgtcatcgtcagaatcgggttgcccgttcgtcgcgtcaatgctcttgagggcaaacatggctgctttgagctgggcacgggctcgctctttagcctgcttttctgcccgttctaagtcatacttatcattgccagcctgtaaaaatttgattaatcgccattctatacaatataataggttagtacttacaaggccgtgtttgatgaatctgctcgcagctcccttatcaagggtcatggggcgttcctcaggctcggtctccagtgccttgatcttttcaaagtactgcttcacacgagtcagttcccggaacactgggtgttgcttcgcatccacgccatgaagccgcagataagctgtcaaatttcattagtaagagtaaatttgtaaaatttgtagtgtgacgtacagaagattaacgattctagtgtgtaggtgatcaacacgtgaagttttgctttgtccataacaggcaatttgtttgagtttttgagaagtgtgctggtcaaaagaggctggagaacagcctccaagtcatcgacattatcatccagctgctcaagcagcggtagtaggtccgttggatccatgacagtgagatgtgatgtagatgagaaattgcttgatctaaaaaaataggacggattcaactgggcggtgaggggagcggtgtggattctggaccgatcatcatctgcgcaactaagatcgctgagaactcgtgcatatccaacaattggttgattgttacgagataggccttggtggacataccagtggctgggctcttgcctatttgacaatatccatgacataaggatcgatacctcaccaaacccatcgctctaacctcctccccgtcgacaaacacatacttgcaactcaatcggatatcccggggagtttttcctcaacattctcataatgcagtcgacatttcggcctcgaactttgtggcgaaccggcattcttggtacatgtgttcggtcccggttccaggtctatggtgtgccaaacacacgatttatctcaacatggagggaagagttgcatgaggtcaaccaggatacgaaagcccctctatcaggacgagttcacatcctcggaatgggtaatctaggttgcttctttgctcattctttagccacgagacggtcaccgccgcccatcacaatatgcttgcacaatgactatctctaccaggcctttgtccggaaaaggggacaaatttctgtcagcacacatggccttgacgatgtcagaacgggatttgatgttgaaacggtggacgaagaaggcagatggtatacaatgccgcctgttgacaaccggccctcgccattcaatccccagtctccgccggatagtggtcctatcgagtgtctaattatttgcaccaaggcgcatcacacggagcttgccattaaagatatcagccaccgcttgactaaagattcgaccatttgtcttgttcataatggcatgggtgtgctcgattctatcaatcaaaatgttttccccgatcccaacaatcgaccacattacatccaggcagtcttcagccatggtctgggtaggaacgactcgttcaagatttcgcatttgggagttgggaccacaatccttagcccagttggagatccaagcatccctcccacaaacccggaagctgaccagacgtgggcgccgtccacaaaatatcttctgcgcctcttgactctcactccgccattggtcgctgtggctgatacaccggcaggtctgttacaatatcaacttgaaaaattggcagtgaactgcgtcatcaatcccctgactgcactgagtgactgtaccaatggcgagatcttgtactcgttcagctttacccgtgtcatgcggctgctactctttgagatctccgccgtgatttgtgctcttcctgaattacaaggtatcccgggcatcgaagatcgcttctccccagaacgcctgcgtcgtttggtcgtgaacatcgcgagcaacacggccaagaatcacagttcaatgcagcaagatatcaaccaaaggagattgacagaaattgaatacttcaacggatggattgtacgtcgcggtgaagaactgggtatcaaatgcgcactcaactacatgatcaagcatttagtcgctgccaaagcagctacccatcggagccgagaagctggcgcgattcccctcgatctcgacaatgtcatctctaccaacgaacctcccatttaactgctccggactgccttcttctgtcaagtccttactctaccttggctccttgtcatatcgctgtgtgtgagcaggtcaaaggatttaacaacaatctaaattatttgcgggaactctatacagagacagttttggccgcatgatcgcagagctctttgatctgcttcaaccgtctcagcagcatctccgcttttgaacgatgtgcttgcactgtggtgtcgagttccatggtcttctgcagcgcagttatagttgcatctgcctctgccgcatatgtctgaatccacctcttgattgtggcctcggatcggctctcgtccaaaccctccgattggccttcaagaacatggttccgccaatccttctccttcatataactcagacatgcagcgacctctgtgcggtaacagggtccgtgtggagtgacttggtagttactagcgctgtgtcagtggaggactgtatatattgcgtagagaatgcgcattgtcatgtaaaatatcaatcaaaccacatacccatgatactgattcagccacaactcctcttgctgctcagcagtttgaatgtcccggaaaacaatatcatcaagatagatcgaatctgcttcattcacatcgaggaagaagccatctatagaaaggggagggatgaagtcagcacgccgaaggaaaaagaataacaacactttctcacattctgctagtaaagtatcattcggatgactaccatagttcatgaacacttcctcgccctcctcataatctttcgtagcgcgaaattcatatacactctcatcgaatctgacatcccgctgtttccatctagtgttagctttatcagtagtatggaattcagacgaagtacgtacagcaacatccgcatgattgaagtaatcagcaaatggcaccagccccatcgcatcattagggtcttccggcgtttcctggccctctccaatccaatagaagctcctcgtattcacgatcagccagttgtaggagaatgtctcccagttggtctccgggaaaacagaaatgacgtccgtccatgctttgcgcaggcgctgggcctgctgcgaaagaatgttctggtgatctgagctgtatttcctcgttttggggcctggctgtagagtattccagagacctgaaatggacggcgggagaagacttggctgcttcgagtctgtcgaggcgtcgtccttgctgttgggtaactgcggtcctcccaggacggttggccagaggatcggcatgctgtcttcgaagtcttttcggctgggccatgaattgcgccattggtcgtattttgatagttcatctggtgcagcgtgtgtgagatacgctgctagaagtgcttgtacggcaatgtcttctgggagtttgtcgataaaggcggaagggatatcttcggccctgagcatcaactgtgtcggcacttggaggacaatttctcctttctaaacatatacttagtgagcaaatttcaaatgagaagtagatatagattcgaaggctcatagtcatactttaatgttccgagtggccatcattcccaacccacgtccttgaaaccgggctggggtcaccgagttgatatctatgccattggagattgcccattcagtgaaggcctcatgctcttctccgggccaccattctggcttcatattggcttcttggcagattttgagatgcttcctccagtcagcatatactacaagacagggattgagttggagagatatacaattgttagaacacaccttcagagtagtctgttctattatctcctgttccttcaaaccaatagcctagaaagaatatttagtagtctcaatgggcgtcgatgtgtgtctgaaattcactctacactgtggagcagaaggttatcgataaaggcgttatcgcgaactacggcagggcacgacgaccactcgtgccgtccctgccgatctgataatcgtaccacttcggctttcacttcagctttcgtcccagacgatgcacaagttcctttagctttgggattcataatgtcagtacttgggaggcgtggagcaattgagcttcgagccttggctaccagcccaaatctatcagctgcaagcactttacggcccttttccgtgctgaaccgcccaccaccaaactaccccggccatgtcccattgaccactattgaacgcggtgctcttgctataggctcggcaattggatcccttatcaaccctagaagagcgggtgcgtggatataatttcctacataactggaatagaatcttggatcacgatctaatttggtactctatagatctcattgcggccttgggcgaagccaccgccacaccattcttcatatatcgactacgcgatgctatgctctcagatccaacagggcgccgcattctccgcgatcgtccccgcatcacctccgagaccctcaaaatgacctatctccgcaccctccccgagaactccgtcggccggacatacgctaaatggctagatcgcgagggcgtatcccccgacacccgagataacgtccagtatatcgacaatgaagaatgtgcatacgtcatgcagcgataccgcgagtgccatgacttctaccacgcagtgacgggtctacctatttttgtggagggcgagctcgctctcaaggcgctggagttcttgaatacacttttgccgatgacggggctgagtctatttgcctttgtacggatgaagcccgccgagaaagagcggttcctctcgttacatctcccgtgggctattcgcagtgggctggggagtaaggagcttatcaatgtttattgggaggaggtgttggagaaggatgtggacgagcttagagctgagctgaatattgagcgtccgccggatctaagagagattcggaagatgattcggcagcagcagaagcgggaaaaagagagacagcagcaggcttcgaactgagctgggttgcgtcctgtcggggcgatgaaatctcgaatatagggagagatgtatgattattgaatcgttgtagaccatatcaccgatgcgcagatgcgcaaatgcgaggctgattgccttgaattcaacccagctgcaaatgtagaagaaaggaccataacgcctggagtagattttcccagtggccacgagcggatagcaagagaggtatccgaatgcaataaacaaaagggccataggcacaagtgatcatcgatcacattttatgcgacccttacaggtccaagagatcatcatcgtcatcccatccacctttgcggcgagaaatgacaattttgtgctcctcctcttcttttcgctggttctctgcaacagcccctagcagctccttaagttgtgcctctgttaccttggaccgtaactgtccagactgggcgagcatgatgaggcggttctcgatatcggttgcgcgcgactccttaacgagacggatacggcctaggcgatcggcagcgtcggggtcgaggatttgtgtcaggatcgaagcgcgttgctcggctggaatgaatcaagatgggttagatgcggaaatataaggacgtcatcgaatggtctaaagggacataccctcggcttgtctagttgggttcattagcatacagcatcttcttgcgacttattccaacacttacctcctctgctgtgcctgctcaccaccatcctgaccggctggaccacctccacgtcctccttgttgctggagttgcgcgagacgagctcggcggatctgtttctctcttagtaccggagccggaggatgcagacctctcacatgctatggtgcaagactgacctcttctagctctgcgtctgccatggtggatattcaaatcaagtgaggggcttggagtgatcaagtgatgaggaatcaaggattaattcggtgtaccccacttgggctcgcctgagtacggaggggtgggacgaccatacttcaatgttctctggggtggttttgagatagttatacaacaatttgctaatatatttactggcagaaataggaattgaatactgaatgtcatggtggtcataattctacgacttgtatatgttcaactaccgtctatatatttagtatagttgtcttcaacttcaccctctatagtagataattataaatttaaacgccacaaaagataataatattaaatagagatacgtagaaataagcagtgaataacaacagaatcattcaacactatctacatcgtcgagtacatatattcaatgtcccctgggttcggagtaagtctcctattgtaccccgtacctggggaattaattacacgtgggactggaatgttttaaattcctccgtacaactacgcctatttgtacataaccattagtctatttctctaattggctggcttaatggcctaatatcttactatattcgcgtggtcaacgctatccggcatgttgtgcgtgataagaccttgaagagtacttttgtagacgcgtatcacacagccagccactaacaacacggtaaattgggatccattctactgcgccttgaggggcaaatctcaggaaaaaaaaagcaaaaggcttcagggttagctccaaataaatcccccgggggctatcagacgcgcccggggtgtccgtcgttccgtctcccggtggcaatgctggatttaccctcacggtggccttcccctcacgcccattttatatttcatattcatatacaagtcttcactccctgtacaagtgcatacgacgtaagcagtcgatctttcaatctttcaataagcccacccgtgctcggtccacgggttcatatccgggtgactaagcttcgattcgccctcgcgctgcaaccctgacttcctcgacatcctcaacaggctgatatttccgatcagacctgtttgtggcgattcaatccttttcttcactttcaaacacattcctttctgttgtgtcttcagccgtccgactctcctcactccgaattccggattccgctatcttttaccctatcacgtacccccgtggacctactcgcacgcgcgaactttcgattctaaaacctgtctttttggtgtggatggcgtggatagcatcttgtctaccaaagcttttctggacgtgatctcgattattgatcttgatctggcgacgagcgatccatttcttcccttacatcccgaacgccttctacgtcactcaccatggccgagtaagtatccatcaagatttccgcgacttcaattattgacgctttaggtggggcagtttaattgcctttcagacctcgcatcatagcttcttctccccatccaaaatgatctcgcgcaactcccataagaggtcgctctcctccgagcaccggtccttatctcctgaccgaaccgtcacgaaagccaagtccaccaccaatctctccgagatcgccgctgccaatgcagcacaaaactccggatattacgaaagcagttttagcacattgcaagacccgcgattgctgatcgggtcggaggtctcgcattcgacgtcatcgtctcaccacccggatctgagcaacgaagtagcggcattgtctgtgaaattgatccaggctatcaacaaccaaacaaaccttgacgataatctggtcgctactcggcaagagctagagctggctcagggcaaaattcaagctctggagtaccagaacgagaaatatcggcgagatattgataaccaaatctatataaagaaggtcgactctgatcgcgaaatttcgcaattacgagatgcattagctgaagaaacgaccctgcgtctcgccgctgaaaagggcaggaaaaatattgagcaagaagtggaaactctcactgcggctctttttgaagaagccaataaggtcggtaatctcctttaacgtatgcattttgtactaaattttaacgttactttagatggtagcttcggctaaaattgaccgagaggcggtggaaaagaagaatgagcagttgcgttcacaagtcaaagataccgagttgctcctggcatcgcatcaagaccagcttgccgagctcaagtctgtcatgcaaacgatgaatcttcacaaagatgacatggaaggacgtcccgctaacagtccatcgtctccggacgagtcacaagcgcaaggttctaaccaagacactgagtttgaacccgttcctatattgattggcaacccggaggagtttaccccgggtccttcctctagcttccctcatctcctccgcatggtatgtcgcgcggatttgcaggcttatgaggatttccgcgatttgctggtactctctcggagctcaaaacctcccagtcgtgctgccagtgggtcatatggaggcctcaacgtgatgggcctggcaagctttgcgagtggagggtctccatcgtcgacctcatcacctaccaaagggtttagctactcccctaatgggagcatatcttccacaacgggttcgggattttccttgaaggaaactcgcttctacaagcgggtgcttatggaggatatcgaacctacattgcgactagatctagcgccggggatttcttggttgacgcggcgtaccgttctaagtggtatctgcgaaggcagtctcgtcgtcgagccaatgcccacatcagctcagaaattcgagttcccctgctctgtctgtggtgaacgcagacccggcacgtctaatgcgagaacccatcgtttccgaacgtcagacagcgagactgctcaaaggtactcactttgcattctctgcttagaaagagtgcgctcatgttgcgagttcactggctacttgcgtctcatccttgatggacatcttcgggctggggataccgaagaagaaaaggaaatctgggatgagactatccgtctcagagagaggatgttctggtcccgcgtcggaggaggcatcattccattgggcaatcgcccaagcgaaccggaggtgccggccagcacagagcctaatactggcgtccaagacgatgccgaccagtatctctatcctgtggacgttacttatctcgagcccaggacagaaaaagtacccgttgctgatccaatcgcgccggaaacaccagttagagcatccactactgatcatataaccccccctgatctttctcgacctcaaagccctatgtatgacagggatgatgctgcttctttggatgacttgcaacgcaagcgactttctattgattcagcagcaagcgtttatgaagaagccagcactgacgtggatgccaataccacggcacctgcccccaacgaaccctcgattattcagagtcgagagacagacacagacatcgccaaacccaatggtttgagcgactctttacctcggttgatcacaagcgatcaacacgagtgagacgactacacgttttacacagcgtttaatgatccgcttaatgtcttcacccttcactacaccccttgacattgcgttcttcagtcacttaattttcttctatttcctccaggtcgttgataagacctgccttttggaaatgctgcttctgcttctgcttctgcttctacttctacttctacttctgcttctgcttctacttttacctctacctttaatgaccctttgggttacaccttgataatgttcctcatccgttctggctttttgggcatccttctcttcattttcggcagcatggcctactgtattattatcaacttttcgcttccaaccatgtatacataattatgcgttttgctttccccctttccctttttttttgcggacatttggaccaggtgcggcattgtggattttcactgtttctgttcttttttctcttttttctcctttttttctgtgcccacttttgattcgcggcaatgctggtttcgggacccattggtggaagttcggtgataaatgatagacgatttgaatcaaattgcatacaaagtcatatattctcttggaataatacacgtagaagatgcgagtaacgcatgccaattccagtcactaatgcctagaatcatcactacttcatacggaaatagacggatccaagtactaaataggagaacagcatggactagacaaagatgtttcatgaggttaagaataaaaaagcgctattgtacacaaataggaaaaaagaagctcatcatccagattccatccctcccaaactccacaaatggcagaaaagatagccttcgaaatagaaaacccgcgaaaacctcaatgcgaacgagaacatcccgtctgaactgtacgtagccggggaggatatcatttcttggcaagctggtgaatgtgtctgatctggtcttcgatattcatgctctgggggttgggagtggcgttcgggttctgtgggccagccgaggcatcgagacccgtagacagacgcttgcggcgagcttcctcctcggggtcgaggggagcagggtcgaagacgtcgctgcgctggctggcaagacgcttgaggttgttgaccacgtcgacggtggacagattggtggtggcactgcgggcttcggccttggcacgctgttctttccagcgcgggtcgagcagctcgatacggatgtgctcgtccagctcgttggagggcactttttggttgcagtaagggcagatccccatctgggcttgttgacggcgggcctgagcgcggggcacgtagtctgagcggatgcgcattggctgttggcctgcgggggcttgggctgctgcctgggcggcggcggcttggtcgcgcgcctgagtccgctcgcggatgcgctggtcttcggcagggttggtgaactgaccggctgcggggtagggtcctgcagggtagggcgcgactgcgggctggggggcgggctgagggacgggcattggtgctggtcgaactgggtaggcgttgtagtagacgggttcgtcaaggccattgggcatcgcttcatcgatacggagtgcgttgagggaaaaggacgctctctgctcgagggaggcggactgcaggtcattggcggaggtcggcggtggcaagtctgcgtggttgtcgtgctcggtgaattcaatagtctcgaccacgacgaagtcatgccagtcgatctgggcgtactcaatgcgttcctgttcactttgctgttccttctcttgcttctgttgacgttggtatttcacccattctgcgcgctgcttagcgcgctccatgacgtggaatttgttctttgcactttgttgcagctcttcgattctcttcgtggttgaagtcacgtcgtcgataccctcgtcgcgaagcaagatagtgtattggtcgaccaaacgcgtgaagaattggtagagactatgctgtgggcgcaagaagtcgaactgggaatttctggcctcgcgctgcgccagcgcggtcatgaatgacttcccccgcttcgcgacaaacatcgctgtgagcttcaccacctccaaatcctgcgcattgataataggcatgcgcgcagagaagtggaacggggatggttcaggtggtcctttgggcttttcgggttccgcagcggcgacagcctcgccagctcgtgctggtccgactcgacctgctctgtactcggcgatataccattgatagtatggctcgtaggcatctccagcattcaggaaagagaatttgtagttgttcctttccctctcgcggatacggtcttcgaagacacctttatggcgaacgacatagcttgctgtggtctcgatggctttgcgaatatccttgggaggaagaaccataccctctggaggcttgataaccccctcagacccctcagggcgaggtgtagttccattggatggctccatggtgaatggcaaggatatgaagagatagaggtctcgccagtaggaaagcaaatgatggatccaccatttcaccgccgtaaagagtggcattttgacggcggtgggagttttggcggtgtgtgttgtggcggggattggattgtggcgtgggctgtgggattgtggcgggtgcctcccgtgcacgcggccatgttcctgtgttctgcatttgtccacgggaatgtttactttctcttttttatagtcaattgatttctagatcatcttatatacatgtagatatctaaaagtatggtatttcaaatctacatgcgactggcgtactctgtagagcccgttaaaacactaggggctaaaaactaaggggctcacatgttgtcctccacagccgccgttgatctggcctcaaggcggaactgcacactgcacgctttcgtccatctgcgttcactccagttcttgattctcaactttttttttttctttcttactctctcttcaacagccaattttctttagtcttttacttcttccctgtcatggggcctttttcctcattattacacgatcattaattggtgtgctgtttgaagctattgaacggttgacagctcgaggtcgaacatagctcccgatagcatccactcgtccatcgaaccctgagaaacctctcattgacaattcaaactataactcaactacacgcaatcctcatatcgtttctcctcgacagtccgacttcgattcctactcccgcgccgttctcctgaaccgctgacgtcgtatcgaaacaatatgggccagaaagcgcaagacacgctggccgtgcggccacagagccgtggtaggcgctcgcccagtcgatcgcctaagcccaagaaccgcaagcctttggcggtgcctcagacgtatgcctcggagggagtgaagaacaatgacatcttcaaactccccggctcggactatagacttattgtactggtaactctgatcgccgcagctgttcgcctattcagaatctatcagcccaccagcgtggtcttcgatgaagtccagtacgttccgcccaagcttgtgttttcaatcggaataaaaacaaacagagactaatgattacgcgtgaacagcttcggtggatttgcttccaaatatatcaagggaaaattcttcatggacgtgcaccccccgctagctaaactgctgcttacgctggctggttggttggctgggttcgacggaaacttcgacttcaaggatattggcaaggattatttggagcccggtgttccttatgtggccatgcgcatgcttccagctattctgggtgtcctgactgtcccattgatgttcctcaccctcaaagttaccgggtgccgaacttcaacttcagtcctaggtgctggtcttgttatctttgacaacgctttggtcactcagtcccgtctgattctgctcgactccccactgattttctttaccgctctgacagctttggccttcagctgcttcaccaaccaacaagagcttggaccggcctatgccttccgtggcccgtggtggttctggctcgtgtgtaccggtctttctcttggcgcaaccctgagcgtgaagtgggttggcctcttcactatggcttgggttggatctctcacggctctccagttgtgggtactgttgggcgattctaaaaatgtcacaccggtatgggtttccaaattcagatcaagccgtgttctatgctaacagtaggattcttacagcgtctgtggttcaagcatttcttctctcgggtattctgtctcattgtcattcctctcggtttctacatggccatgtttgccatccactttacatgcttggttaaccccggagaaggtgacggcttcatgtcatcggaattccaggcaactttgaactcaaagtctatgcaagatgttcccgcagatgtctcatttggatccagggtcagcctccgccacctgaacacacagggcggctacctgcactcccaccctcatatgtacccaacaggtagcaagcagcagcagatcacgctctacccccacaaggatgagaacaacgagttcctcctggagaactcgactcagcctctaggaccctatggagaggtcgagggcccattcgcctgggataacctgactgctcctggtttcattgaggatggttcgattatcagactttaccatgtgatcactcaccgaagaattcactcgcatgacgagcgccctccggtgaccgaggccgactggcagtatgaggtctctgcctatggatacgaaggcttccctggtgatgccaacgacttatggagggttgagattgtgaagtccatgtccgagacccccgagtctaagaagcgcttgcggactatccagtccaagttcaagttggtgcacgtcatgactggttgtgtcctgttctcccacaaggtcaagcttccggactggggatacgagcagcaggaagtgacttgcgccaagggtggtactcttcccaatagcatttggtatattgagtccaaccagcatcccgctatggccccggacgccgagcgagtgaactaccggaatcccggattcttgggcaagttctgggaattgcagaaggtcatgtggaccacgaacgcaggcttagttgagtcccatgcctgggattctcgtccgccctcctggcctaccctccttcgtggcatcaacttctggggcaaagacaaccgccaaatttacctcctcggaaaccctcttatctggtggtcgaccactctggctatcggaatctatttcgtcttcaaggctctctccattgttcggtggcaacgaagttgtgatgactacaagcacacttcgttcaagcgctttgactacgaggttggcaccagcgttttgggttggttcttccactatttcccattctacctcatggcccgccagctcttcttgcatcactacctccctgccctttacttcgccattatggtcttctgccaagaatttgacttccttacaaaccgcattaagagcctggggcttgcgtcgaagcccttgatcggaaaggctctgatggcagtcttcctgggacttagcgttgttgtattcacgctctacgccccactcgtgtatggtaacccctggactagggatgcctgcaatcaggtgaagctgcttggatcctgggatttcgactgtaacacattccacaccgacgtaagtgttccggaatggaaacctcctcgacgaggttattgaacgaatcgacgagatcacgactgacataggcctttcgaactccactagttgagccagtacatcactcagtacgtgccgagcctatcccccgtggctgcctctacaaccgcagctcaagcaccacccccaccgccaccagtccaggctcaagagcctgcgcctgcgcctgcaggtgaggctgttcaagaatcagacccagcggccgtcaccgcgcccaagcttaagggctctgtggcgcgcgttgagtaccgcgaccaaaacggcaaagttcttgacgagaatcttgtagcctcgctccgagcagaaggtaaagtcaagttcgagactcgctatgaggctggtcatcctctggagaatgcccatgaggttcctatcgtcgatggccagctcgctcccccgcacccggatgtgcagggccagaatcccgagactgccagcgcgcccgaagacatcgtgccccctgagagccccgcatctgtggccgatggtaacgagcgctccgtcgagcagccaagctccatggaagccaaacctgccagcgagggcaatgatgcgactagctagtggccggaagataaaatgtaagaggagagtggattctgccatgtataatgagactccatagagtacttgtccatttctctagtcaatgttagcttttttttagtgttgccacaattgacagtaataatttttgctatataaaataatattaaaggtagtcagttagctggccaatctcagcgcttgtagctctggtttgtcaggtatggttctagattgctaattcaaccttgtaaccaagccagcaggatacggatctaacggaagaaagagacatattcccaattgactctttatctgaatacggatactatgcacaaatctcttgctatccaaatggcaagttcacgcagccctctcctctccccggtcttagtgtacagcagccggccgcgggaagcagcggttcgcttcattcgacttcttaaggcacttcttgtggctaatcaatagccgtttagtagtcccactcctccttgccgtacttgttgaaccgctcgtggaggtcctattagaaagaagctaatgtcagcatttactaccaaaacagcaacgcgatcacacatgacactttcaacaagttctgaagtgatccaaccaacgtatggcataaataagaagtatcagcgaattcatacctcgggcagggtgacattgggaacaatgacagtgttcatggcgctgggggcagcacggaggggctggttcttgtcgtcgtgggggtggtactggtacttgtagaccttgccatcctcggactggccctgccagggcatggcactctcgccaatgcgaacgttgctctcagaggtcacggaggtgggcttgcggccgaagtacctatattatcgcaaataccgaactgattagcgaccgtggtgattattgtatgtgtatgcgccattgagagtgataggtaggtgaggtaaaccccaaaagaggtgccgacgtcacagtggcggaaatggggcgacccagggacgaggcattgtagggcaatttcgggagggatgctcaccatccggcaatcaggaaagcaccagacatgacaccgagaaggacctagaagtacagcagttaggacgaaagatcgagcatggttcaatggctccgtgggatccgtacgtagagctcgggatcacgcttgccggccttttcgaggttgccctcctcgaccttggcggagctgaagcggcgcgggggagcgcggaggagggactggcgggtcagagcccggcgggtagccagagcagcaattgaggacatggttgcagcaattcgagcgtgcgttggaaggataattcgtgggcagagaactggagacgggatagtgggagagaatcatgaacgtcgaatgatgttgccggaatatcaggtgacgctgagtcagcaccggttcaagcaatatgggtcacgactttcgagcttcctgttggttgatattctatggttcaagttatctgacttgctgacgcataaacgatcattcggtgttgattctgtgatgtaattggccttgacgatttgtttggcctctcgatcgctgtttatgcctgaggtatggtgttccggttctttccatcaggggctctgtcttggccccggctttgcggcgcgtttgttaatttgagcctaatgggattataggaccttgattaatccgtctattcacttcgctcattagttagacattgtctcggctccatcgtcactcctttctcagctccgcgcgctgctcaccgtatcccgtcgatattaactgcctacgttacaccgcaattcgcttccatcccttcgccgttgccaattaggaacacaatatgatagcgtgcatttacatctagcaatttttaatattcacatcctttcatggccatggaaaactccgcagatcgtccagagaccggcgacacaaaccaaggatcgataccgcaacatgtactagggattcctcgccctccctctgttggcggaatttcgtcccgagtgacagatgaagatggagagcgaacaccatcttacacatcacctacccagtcgcggttctctgctacctccaggcgtgctcctccagtgcggaactccatcaatgcacccagccaggtgaccagcaggcctggtagctcgggcagtcgtttgagtagaacacatataccgtccctgacggcacaggggttttttcggcccatgagctcgcaacgattgcaggcacaccgaggaacacgccctgcgactaaagggacgatttcatccaccgacgactggacagagcatggaagccagaacaggaggagcttaatctctaatactagcacagccccgcaagtctctcagcttccggctgatatggaagctcctccgtctcggggaacagagttcacagattctatcattccagaccgcaacacctccaacgctagccctgccggtaacacaaccatccgcagtctgggtgaaagcgtccgactgctgcgggatcgagatcaaaaggagaagccccagcgtctcaacctgggtgctaactatacagggaatgccgggcaggaggcaccgccaaaatcacccctttcattcctatcattgcaaaataggggcgccggacacaaccacgattctcgggctcatcaaggccacgaacatctttcctccgctggctcctctccgggttccattgacctgaaaaaaccccctctacaaaaaacgaatttgggcaagaattaccagtacttccttggcaacacattcttctgcggcggagggcggttccagaactcgagagacaagcctgtcaatattgcaacagggcttctaatcgttgtaccatcggcactgttctttggcttctcgtacgtgaattcgcttgatgtgaccactgggccactagctaacctctgaaatcagggctccctggctgtggcataatatctctcctgccattcccatagtgtttgcttacattttctacgtgtgtttctcgtcatttgttcatgcgtccgttgtcgaccctggagtaagtgactcgttcttgattgggtttggtgatcgctaacatgatatttccagattatgcctcggaatgtacatcctatgcctcaaccacattcttcggacgatcctctggcgcctggtccgccgacaaatgactgggtcatggtcaagcttgctacttccgatgtagctgccatggacgtgcctgtgaaatactgcaagacatgtaatatctggcggcctcctcgctgctatcactgccgtgtctgcaacaactgtgtggaaaccctcgaccatcactgcgtgtggcttaacaattgtgttggtcgccgaaattatcgctatttcttcactttcgtcagctcttcaaccctcttggctctctttttgatcggtgctagtctggcacatatattggtctacagatctcgggagagcatatcatttggggctgcaatctctaaatggagagtcccatgggccatggtgatttatgggttggttgcagtgccataccctacatcgctttgggcatatcatctcttcctagttggtcgcggcgaaactaccagagaatatctcaactcgcacaagtttgccaagactgaccgacaccgaccattcacccaaggaaacatcctcaggaattggattgctgttcttgggcgtcctcgccctcctacctacatgcaattcaagcagcggtatgaagacggtgaccaacgcttagactctcaaaagagcaaatatcgcgtcccggatgtcgagtcccaaggtattgagatggaacaagttggtccccaacaggattaaaacaaaaagtcgtttttttgcctgtcggccttgtttcgacggctacgatctgtgaagatgatatttatgatttcctcttttttgcttcccaataattcctgttcttactcataccagcgcatctatcactttctaatcactacattacacatacccttcttgtcgccatccctctttgttcaatttgctatacctagcgcagacataattctctcattctactgatctatgacgatctatttcttatcatgttatatgctgttacttgttgtgactacatacctgggaatcggtaaccctatccagaattagcctttactttccacgtcctattaggactatatattcaccgttgcttggacatttgatatcatccagtgtatgtcacggctagaataacagtccatatatccatatcatcccagacatagattctctcatgttcatgtgggggcgagagggagcgatttcggcattcggcacaagatctagcattgtaagccctggaagatgcttactcttcccttctcccttatcccttgctttcttattcttcttattgcggtaatattcttgtacgttgggacattctacgattggagtgttcgaaagggttgttgcacgcgtcagactctcgccctaaattgataagaagcgcggcgcgggaagctgatcctcttcgatccaccatcttcccctggtattaccccaaccactttgaccacacgcggcagttgttctacatcgatagagaaagggcggttccaggtggaattgtccttcttgttatcccatcctctccaaaatggcgccacgaacgtcccgatcaaccgcgtccgcagctcccgatgcccaggctcacgagcctactgaagacaacatgagtctcgacgtgccagaacaactattgacgcctgaaaacagccgctcggagacttcaagcaacaacgagaacgcgctgaccgacgaaacatccgcaggacggcgaaggtcaacacgggttactcgcgcatcgtcgcggccgagtgagccactggaggacacacctgagaacgaggaacccgcagcctcatctagcgaggcctatgtcgacagtcttgccaaggcgaaacgctcgcactcttctttacgccacagtattgcagtaatggaatcttccttgcggagcggaaccccagtcaacgatgatactgcggccgacagaactatggcccccgacacgcctgtctcgaggtcttcccagggcttgcaatccgaggatatgaatatggcgcttcagcagcggacgctacgaaaccgtgtggggaaggaattggtcgaagacgaaggaacgaccacggccgaactagtcccatcccgaacctctccgcgcaaatctctacgacggtcaggtcgcttcgatttattgaataaggcttcagatttggtcctccgggccagcagcatactgggaaagcgcacgagaagccagacagacaaggatctcgatcggcgtagcagtctccgctctcgcaatattgtcccgtcgaaagatgaaacggctctttcgacagccaacgggccagcatcgaagaagcgtcgggtatctgagagcgacttgtccaaactccgggatcaggatagttctgaagaggaaccggctgtgcctgcttcgtcgcgacctaggcgcaagatatggctatcacatggcctctatacaggacaggaaccctcagactcgcctcctaagcagcgtcggagtaagaattcgaagaaaactggaacgggtcccatgcatcgcaccatccttcctatgcctatgttcaaaggtgctcggcttttgaagactggacgggactacctgctgccgtttgatatcttttcaccactaccacctggccagcctaagcctgatgagtggcgcaagactaacaagagtgagtgacgagtatcctacatcatgaagtgagggctgacagacagtctagatgtttttgttggtgatgccggaagcttctggaaagccaacaaaaaactcgagctgtctacttgtatgtgtaccgaagacactggctgtgatgataactgccagaaccgctatatgttctacgagtgtgacaacggtaactgcaggctgggtcccgagtgcggtaaccgaaatttcgagggccttaagcaccggaccaaggccgggggcaagtataacattggagtcgaagttatcaagacagcagatcgcgggtatggcgttcgcagcaatcgttccttcgagcccaaccagattatcgtggagtacaccggcgagattcttacccagcttgagtgcgagaggaggatgagaacagtatacaaaaacaatgaggtacgtgccctttctgttgggctttactacttactgacatcgtgaactagtgttactatctcatgtattttgatcagaatatgatcattgatgctactcgcggttctattgctcgctttgttaaccatgcctgtgagccaaactgccgtatggagaagtggactgtcggtggcaagccacgcatggcacttttcgctggggatcgaggagtctcgacaggggaggaattgagctatgactacaactttgagtgcgtattacatgcatatcaagctacttgaccatgcgctaacgatgtaccagtccttactctagcaagaatgttcaacaatgccgctgtggatcagcgaactgtcgaggcttccttggtccccgactaaaggataagcagcaacgtgccaaagaactcgagaaacgaaaggccgagggaattcagcaggcaactacaaaaaaggtcatcgataagaagcgcaaggcctcagaagaagtcgaaagcgatgactcccatcaaggtaaaaagcgcaagatgaccaagtccaaggccatcaaggccggcgtgaaaaaggccatggctaccgttcgtgggaagaaaacaaccaagacaacggcaaaatccaaaagcacaaccactgtcaagtcgaagaccaacgtcaagctaccaaccgtgaaagctacaggccggatgaaggccactgttcgctcttcccggtctaacaaagcagccaaggaacccccggcttctcccaagagaacatcccaactcaagaggccttctgctgagactaagaagcaaatcctcgctgctgcttccaaaggctctggggcttctccccgcaaatctgcgaaaaaggcccctacccagagccccgtcaaagctaagaagcctgctcctaaggctaagagcactagcaaagggagatttggcaagggagtcaaatctgcggctcgccgtgttatgaagtcagtgaagggagcaaggaaatgattgatctctggtcagactacggtcgttattgctgttacggacttgcttgaaagaaccgaattatttgcgcaacacatttttgctgtctggaatcctaggtctgtattctttgttgaccttaatacttgccagtgatccattcgttctattctatttgataattttctggtaatttattctttctatggctaaaattcgggttggcaatggtccccttgctcgacatcgtgtcttccctttgcttcctttcgatttccctgtgcgttttatttactatggcttcatgattccttcggtcttcatttatgcgtcacggttatgaaagtgagagattctgatatagccagggtaagatgcctctgaattcaacatggtttcccctggaactctagtactccatagctcattggatgcatttgtccatgtttctttccccaagagctgtcaactgcaagactattcaaaatcctacaactatcgagattcagatcaccctacgatatgaccctactcatctatcctagccaataaatcgtatagtgtaaaaggttagatcatcagaccaaatctattggcaaattgaaactatctaaaccaggggaatccatagaaaaagaaaagaaaaagcccacgagttaaaagccagcactttgttctatgtgcggcaaaacattaatcgactccaacaagcctcgcgcaagctgagaaattttaaatacgctccaggaagccctggctctccaagatgaggatgatctcgtgcacaatgctgcgcacactctgcttggagaagtcgacaacgagatcagccttgtcgggagtctcgtaagggtcatcaacaccagtgaagcccttgatttcaccacgacgggcagcatcgtagatgccgcgcttgtcggacttctcgcagtactcgaggggagtggcaacgtgcaccaagaagaaggagccagcctgggagacggcgtcgcgcgcgaacttgcgggactcctcgtaaggagcaatgggggaggcgatgacagcggcaccggcacgggtcagctcggtggccacgaaggcaatgcgctggatgttggtgtggcggtcctcgcgggtgaagcccagctcggaggagagctcgtggcggacggtgtcacccagcaacagggagacggaacgaccaccctgctggttcagggtaacctgcaaagcacgggcgatagcgtccttgccggagttcatgtagccagtcaggaagatggtgaaaccctgggtggcgcgaggtgggttggactcgcgcagaattttgacaacctcggggtaagagaaccactcgggaatatgggcaccggagcgcagacgacggcggagctcggtaccggagatgttgagggtcttgacgccagcggggacctggtcaacggggcggtactcgtcggtatcggggaggtaggtgaccatctggaattcgacaacctcgatgccgagctcatccttgtacttctcgacggcgtgttgagcatcgtagggaccgtagaaatcctcgcccttggagttggaaccaggaccggcgtggtcacgaccaacaatgaagtgggtagcaccatggttcttgcggatgatggcgtgccagatggcctcacggggaccacccatacgcatggccagaccgaggagacccaggacggccatgccgttggggtaacggggaaggagcgcctcgtatgcgcggacacgggtgaagtggtcaatgtcaccgggcttggtcagaccgacaacagggtgaatcaggacattggcctggcgggaacgagccgcgcggacagtcagctcacggtgagcacggtgcatggggttacgggtctggaaagcgacgacgcgggaccagcccagtttgtcgaagtggacgcgcaactctgcgggggtgtctgtggaaggattcattagccagattcaagatcaggatgaagaattgaacatacagcggagggcgacatagtcgtagtggttcagcttgttgacagcctcgatctttccaccaatgtagaactcctcgacggagttgttcaaatacacgatagccgggtgctctgggtcaccgccgaagacaagcttagcctctctagtcctaaattggagaaccgcgtcagcgagccccactatagcacgaaccacatcgactcattgggtaaagattgaagttttgtgacatcaaatggtcatgataaagataaaacagggtatccgaggagaaataacgatcgacagtgcgaccggtttcggcaaattgtgaaagagaaagggaaaactcacttgtcggggcggtaaatgtcatcaatggtgagaatagccaagttacggtcgtcacggaagtcacgcagagtgatgcgagtaccggcttggagcttgttctcttcgataacctttttgctagcgtcaagggtaatgggcatagagaaaacattgccatcggcaaggcggttgtcctcacagacactatgcacattgtcagctgctgctgttgtatattgtcgtgcagaatgaggggtttctcattccaatgggatcatctgtatcaaacataccggtcgtagtctgcctggttcatgaaacctgcacgaaaattagtgattgtcctctatgcgcatgttcaaagagaaaggtcatttgaatctgagaatgaacaatcgcacttaccctccagaggagagaaacctccgttcatgatcagctcgagatcgcacagctggcgctcggtcagcgtcacagcggggagagtctcggcctcggcggcgagctcggcgtgacggggagcatcgcgagcgagaaggtccttgaggacaccaccgtggggggcgttggccataatgaataataaagaacgaaagatggaatatgaagagaagtaatgtacaagaaaagaaaagagggaaagggtttggttatcaagaaatttcgagtatggaggggtgtggattgcaccatccacatccaacagaagtcgtcaacaagtggagaccggtggaagtcttggcttcggggtacaggaagttgtttgtgctgttgttatggattttatatggatcttagggctattagggctattattatcttgtgtcgaatgccttattcagataattagcactatacaacatatatgtctttctattttagtagtataagggtataattctgatattctgatcatccgaagaccgatctacaacgttgtataactattgtacgtactgcagtttcagattgtcagattttcaggggcaatagacacccctagaacccctgactgatatcatagaggctttgcttctaaagaaagatcttgtaccccgtagtacgtaggagtacacgtacacttagtatacaaccgatatacctaacgctatccggaagtccaaaagcggcttagctcgacgccacatctgcagaggctgaggtcatgtgaccaagcacgtcacctccgcgcggaatcacgacatcccatcccccaattaggaatagatcgcccgggtgatctgaaaaccctaaatccggctagaattccattaatatacaacgccaataacccgatatattaaaactatggacactatatacatctttccctacatattttcactccgccttcaccgtgctattgggaagtgtgatggtcaatttctcgaaatccacagcaaacgcccctaccttcatggccggctgagtcgcgttcgcataggaatcggccaggtattcttcgatgtcctcctccgaggacagagcggtgtcaagcgagcctgtcttctgcagaatatacaacaccgcaattcgagaaaacccaacaaccttatcgggaacgctgatcgcagtggatgtggaggcagcagcagcagtggtttgagagctggccttggtagcggaggcgctcgtcgcagactcggtttgagtgggtgccgacgtggttgtagctgtcttgcttgattccgagtcgtcgtataggataccgttcatggtggcttcggaacggacagccaggactggtgttgggtcggttttcgacacggatggcatcgaatcggctaccaaattcacagatcgtcgggtcttgcttgtgtcggttgtgacagcgctgaaagctacgagcgcgttttcggtcgtgcaggtgacgtcgttcatgttgaacagagccatgattgtgactgggtcgagggtgatgttgaatttctccttggattcgttgaacagaacaggaagtgcactgcccatggtcgcgttcgatccgtcacttatcagggcggtggtgcagctaccgtcacccaaaacggtgcactgtgagccgatataaccgttcgaacaaatgcacgagcattgggtgccggctgagacgcttacacctccgttttcacaagggttcttttcagcacagggcgtgctcgcattctcgcggggcacggcgacaaggaacacggggagaagaactgccagaatgacaatgatgaagattacgacacagatgagcacgaagatcttccgaggtattccacagcatgtcttcttgcgtcggggagcattagggtcgtcgtcgctcgagttaagctgctcgacattacgcaagttagagcgtccaaagaacacgggccatgatgcggttgatccgcgcgcttcgggtgtcgccaaacccggcgggggaaaggaggcaagcatttccgataaagagccagaattacgtggtcggtgtcctaagcataacagcagttagtactattttcggtttccacatagcctggatccgaaagactcacccatccctttgaatccagcctcatcaccagccagattggctcggctggcggttctcccatgatccaggttcgatgcgagctttgtcgccctccgaatcaaatcagataaactggaaagactcccacgagcctctgcatcccgcaacgcatgcatattcagagcaggaggcttgcgaccgccaggcctcttgtcactcattgttggtgcagcgttgggcagctgtccgaaggcctcgagctctttttcgagttgtgcattggaggagagcgattcatgctttgtggacaagggaggtttttctaagttcaggcctttcggtggttcactcgatgtagtagacgactttcgtaattggcttggtatatggggcgcctggcttgcagcagctcccagcccgacagaccgcgccgtggtgcccttggcggattcctcctgggtaggtgctggcatgtctacaacggaaacagggttagacttgaggatagtacgcatcgtcggctttcctcgctttccaatactggcatttcggacaagcctcgtatcgtcctcttggaagccaggtgagcgctggccatcgtctgaatctatgtcgtatgctcccagaatctcggattcagcgggaccggatccccagcttgggatggctcggctcgatgcgacggagcattttgtaaaccgaggatgggcgagttcttctggaatgggcgaaacagatgatcgacgagcccgagggggccgtcgcgaattcagcggtgcgacaagacctgccgtccggtgtctaggctcatcctgagaaagatcggactcggctggcagagaagtgggtggaaattggggcatatcggaggctacagattgcctgaacaaatcttccgttgcgatcgatattcgaggagtcaggtcgattgtgctggtgggactggcaggggtattatctatcggccggtgagactgcgctagcgcagaaggctgaggttgcgaggaggaccggggaggtaatcccatttctgaaactcggctatctcgttctgagtaaatggatggcgaaggcatttcacccggatgaggtggtctctgaggtggaggaccacgcggaaccaaatacctaggatgttgattggccgggtgtggtgggagacctgtatcaggaagaggccattgtgcctggtgggagatattcctagggacgggaggttgtctcatctggggtggcgaggctctttctggacgcacgccggcatctagcatttgcctggcccgtttgacggatcctttcctggcaggctcgccagagggcccggagtttggtaagtcagtgctcattgagaagtatggctaacctctcacgagaagttagggctcgcagtgtaggaagtgtggcgtggtactgctgtccaaaagagagacttgtctcttaaatattgaatgataatgaatgattgctcgatgccttgatcgagctgaaaaaaaaaaaaaaaaaaaacgaatgaaaagatatcaaaaggattgaaaccagagaaccggggtctggccactgagcaagtgtctacaagattgtagagagtggataaagcaatgagaacgatctagcaaggcgagatccacaggatcaagatcgcaaacgaatggaagggcattcaatgccactgtataaaatcgtcagggccagcttcaagtcatcgtgaattggattcggaagacttaccgttgaaaaaggggactgggaaaacgagaggaaccgctagtatcaaactggcgttcaaggatagattagccccagtctttgacctggatagactaccaattcaaatggggagagcctcaagctcttctaagggtgggaaaaaggagagaaaagaggcattgaaactgacacgaccagggctatggaagctagtccacatctcaaacgggaagtatattaaggctaaacctcacggattaatctattcttccttgatttcgtgcacttccctgtcgtataagagtacgaagttgcatatatccaaagactacgtagtccatgcatcctgcatacttccaacccccttctgatctgcatagcacacatgtcgcttttcagcattgtacttttgtagcgaaaagtagggaaaattggaatgaaaggtcaaccccctcaacatgagacggccaaattactccgtagacgaatcacatctcgactgtatcagtggggttggtattagtcccggacgctaacgtctcatataaaggctcccttaagtaatttgaaacttgttcaatgagttattgaatatgttatagcacatttatatccatgcattgcatattgtatactccataggcttatagactccatagcacatgggactaaaagacgttgaatgcaaaattaaaggtgcagggcggctataaactccgtactttgatagactaggctttgcactgaaacacctttagccctacttggtattagccatttacagccccttaaatgaataatttattgtacgatagatatttctccgctcgagtctatgcatccacagtggcctggtctgggcccttccacatgaacagttcatcatgaggatatattgtacatggtttcctgagttcaacttttagatatgaggcatttgcgactcccaattttaattacatctggtcatacaaggtgatctccttggaaccgcaacaatataatgctttgtgcgacctgtcaaccaacttgaccttgcgacgacggatcaaccgtgcaatatcggacaaagtcacggatacctacaacatagtcgcatcgggggattcgatttccagccgagcccgtaattcgcttatctgctgttccagcgctcgcatttcgaccgttgtactagccaaatccggcacctgattgtctatcgcatttgcgaaagagtcctgcgccctgcgcagcgactgggggaccaatattccataccaatgaattggatcagtagaacgaaacttcttaggagcgcgctctggtttctcgacaggggtgatttcggtttctgcagtgtcagagggttccgagctagccgtctcagccgggctggtttcctcatgtccactctggaccggagaagaagctttggtctcgttatccccatcagcctcctctagtggatcactggttgtacttttgatggagaatgtgtatccaggttcaggtggcacagtgatatcccctttctcttgtggatcgttcgtgggtttctccgtgtcttgttcggattggattgatctgtcaatttggcccagttaacaagcgccaggaatcaatgacagcaggtgaagttacatctttctcgttgctttcatgcgcccatcgtaataatcaggaccataacggcggccaggaggactagagaagttggcctgggcgagagcaaagaacccctactttgtctcagcatatttcatgaaccatgattgacagcgtcataccgacgacagatggcctgccagacttgactgtagtttctgctgccgatcaagcagatgcaagtatttctcaaggagtgtatccaaacattggactgaatcctccaaagctacaggtttcacctgcacttcgggtgcctccgagcccggtcgcgacgctggtggcgtgggtatttgagccatggagaaaagactaaaggccaatgaagcagatatgcaatgcaaatatccacaaaaccgagtgacttgacaataagtccgataaatcccaaaagcttgagatacagaagaaacgtggagcaaaggagctcggccccggtaactccgtcattcgtctccgaacccaaaagaatttcccatttctgcgcttcttcttctctcttgcatacttcaacccactgtatctcttgtgttgtaagagactgtgctactattgatcaaacccatcgattcctgtgcgatttaatttcccccgaatctttgttcttgcaagatcgaaccgccaccctccgattgcgtttttgatacgagtcattgcgcccaacgtacgtgaactacactctggtatctcgaccattgcaatacgaacggtcgctctaacccagcagctcttaggaccacttcttgccgccgcagcgccgtgtcgaccacgcgaccaaggcatcggtgataacctgggttgaccaagcaggcgtcttgcactactcacattcggctttttgactctgattaccacttggatcctcttcaaaatattatcataacttcagctaccatgtctgtcgcgtccctgcaccgtgagactgccttccaggcacggtctttggtatgtcctcttgactttatatgcgcttcaacctcttgtgtttgtccttgatgcatcaaactaacgagcgtctttctcttttcattagttccgctcccttctgcgctattccggacagttttccaactacaacttccgtgaattcgctcgtcggaagacaagggattcgttccgcgagcaccaaaacgccacagaggaacgccagatacaggaactgatccaggagggacttaagagcttgcgcatgctgaaggtcagtggtgttacatggctttctcggggtgaaactcggtcggtggcagatatcggggatccatcctcagccccgcatattgaaagtcgacgagtcctcatcctaccacactgccctacaaatcatcggatccaaatcttgggaataatatactgacatagccacagagacaaacgatcatcagccagttctaccagttggataagttggtggtggaaggccagaagacagtaagttctaccttggcttaaggccttcctccagcactcaaacttacattctctttgaagggaaaggaaaccgggaaccatggaggtattgtccgccagaaggatactgggtaagtcattcaaatgaagctccaacccaccttctgcatgtcactgacttgtagtagttgggattgattcttagacgttggatgggaacttgttattattccattgtgttttttcgataacttgccactggtggactaattaaacacctgctcttttttgtatttatacacccagcgatgcagctgcagctgtagctattcttttatcaagcaccagaaacacccattccactcctgaatcacaaaataaatcgcttttacttgaacaatttgctttatatcaattgagggacactgtcacaatatagatagctgccatagcaagatattgcatcaatgttcaataagtatgcatcacgtgatatctctttacggttctgtagcatcgcaacgcgacttgaggtgcactgcactgtaccaccacacactccatcacatcgcgctaaagaatcctgcccaggaggtcgccataaggacattacaagctttctgatcgggtgcacttgcctttgaatttgtataggggcatctgccatgccttccacggtacgtttcaacttgcccccgtggtgatctagcgccgacctggttgccctagacacatggtcattccagatactagatcttaaaattctcgaattagctagctaaaatccaccacagttcagagcctcgcgctcagggcgacacctcgatggtgccccaaaccgcacccgaaccggccaaatcgatcacgatgtctttgagggattgccagtgcgtcgctggtcccgacaacagcacactttctctcaagcgcctaaacctgttgagtcggaattcgccgttcaaggtccaggcggcgggccaacgctaccagagctccccatgccaagagacagccagctcctaccgccaatcagtcgcgcactccttcgagcagcccgtgctggatgtatccatatcctccaaggtagtcgaacagaggatgaggataaaagcggagaagatgcggatgattcggcctccgcatctcatgtggctgatcggagcttcacaactcgcaaatggatgacgcttcccaagcacctcgagcctgcggaggtggagtttctggcaaagaggcgacctggtctttcatctctttatggcaccgttactactatagatggaagctccgggcccatgaggagaacaaaattcaagaaagttgatccccaaacaggcaacatctctatctacgaggcgtgggtgcctgagggccatcgcattgaaggagagattactggcgacttacagacatttgccgagcagagcaatgtgcctgtgaagcccgaggcgcctgcacctggaacaatcgtcgagggggtcggcattgtcaatgctgagggtgttgttgttgcggaggctggatcagcagctgtaatgactcctccaaaacgacgtccacctccacctaagcgaaagggcaagggtattggaaggggccggaagaagaaggtcatgtttgcgcctggcgaagggtctgatgccgcgacagtacatggagctggcccctctcatggcaatggggagggtgactacaagagagaaggtcagcaggatgcttcacgtatgtccattgaccaggctggtcaagatgaagacgatgaagatggtgacgagggagatgacagcgatgacggtgatgattcgatgatggatgcgaagacccctgatacaccccagcctctgtctggcgctgagtttgtgaatcagccttcattcgagactcctgccaagcaatcggttgatgtcgacatgtctgatgttgttcccgaaaaccagccccatgcccctgaaattccttcattaagcgaaaaggacgagcaaaaccagcccgaaaacacctcggaggtggatttcggtgccctgacttccaacgttccctcagagaaggcggaggtcaacgcttccgatgagaagcctgtcatttcggagcatgacaagactcccacttctcccaccacaactgccgcaacgacaagtgaatctaccgagctcccagctgcagttgccgaagctcaaagctcagatatcaaggtggaaggaggagaagaagccacagagccgacggctgaccttgcaccaaaggaggaacctgctctttcaaaccaacaggaaattgcgactaccgtgccacctgttgaccccgaaattccctcggaacccccagtagcacgaccttcgacccaattgcagacacttgagcatacagaaaccgagcagacggcagtatcgaacaatgccttggatgaggctcaggaacctcaacagatcccagacgagtccgtttccaatactgacacacaagaaacgctctcgatagctcctgatcgtgaacaaccgaacacctgcgatgctttcgggcccagtctacacccagacgaaacaaaagacgtcgcgatgggagatgccccgtcaccagaacaaagccaagggctcaatgcccagtctctcgcgaacccagaagtacctgaagcgccagagaccgaagagcatccacagtccaagcccactgcagcggagcccactgcagccattaccgcagacttcagtctattgaagagatcaacgcctgccgtagacgaagagtcagaaacagcaaccgaaacaagtgttcgtgatgaaactcttgccaccaaagcagagctgcaggaagattctcgatctggcgaagctaaggaagcccatgacgaacttgagaaactacctacgatcccacaggctggttcgtctgagtctacatgagccacttgtgagggctttattttctcccagccaactaatgtacaatgaatggcattggttttgtttattgcctgttgatgggattgtttatgtttgtggataggcgtataggatcattgtgcatcatattgtaggaccacatagtttattcttcaattcaaatcttttcttcgaagtgactccgtttactcgtgcttttttctctgttcttttgtacaatagacgcttatcttagggatgctgggtatgaatatataaattacagcatacatatagagatgagaagaaagtagcaagtattatttctccatatggcgaaattagcgaaggagaattagttacttcaaagcaaagccaaccctacaaaagtttcttcggaaaagaaaaactaccaggcaagttgctgaatatccttcgagatctgccatccatgcgccaatgcaactcttctgtaggcgtctactgcttcgcctactgaatagtcggtttttgcgctatggatatccagacgcgcgggtcttgggtcggtgctggtaatagccatgcgaacctgcaacaacaaactctcaattgaagtcgttggtagccagcccgagtgtgtcagcagttccatgcacatagatccaccggcggtaacgtggccgccgccccccgcggcggactggaggnnnnnnnnnnnnnnnnnnnnnnnnnnnnnnnnnnnnnnnnnnnnnnnnnnnnnnnnnnnnnnnnnnnnnnnnnnnnnnnnnnnnnnnnccggccgcctccagcggcgaactggaggaaacgagggcgaatgacccgtacaaggggtggatccatagggaattgccggggaaagcggagctccaagacgatgcttttttgtttggtctctttgaggtcttttgctagtgggagggatggatcaaacgtatgcagctctgcaatccattggtagactgttgtaatcaagctggggtcgacgtaccatccgagctcgtggagtggcactcgctcctgggtttttatggtagcctgaagatgctgctgtaggatttttgtggctgaggtagtcgcaaattggggtggagagagtgtaggcaaagaagtatcctgtagggttccgggtcggaaatcagtcttgaggtctgttgctgggacagctccttcttgcatgctaggacctgggggactttcacacatctcatcgtcagataaaagaatgctgagatcctctgtggtcgtttcaacgctgacattgtcgtcgttgtcgtcgttgtgttgttcagtatcttgaattgaatatttgcgtctcttgggtgacggcacaaggtctgcaagcccggtttcactagcggcatgaaggaagtttgccctttggccgctaaataccgagatgggaatcttgatctgtttgttgctgggaccgacagccggataacgtttatcttgtttgtataaaaggctttcatcatgttgatacgatgatggctgggcttttgagctctttgacttactcccatgcgcatatccatcagttttctttgccataccaggtacgttcaagtcacagagcttgacgaaaaggtaccttggttggatccaatccaagtgttgcacgacgtagggactacggcacacaaactgattgggagcattgacgacctcattaagagaaatcaccgtcgcgagctccagccgactcgcggacaacgtgagagatgtggaaaacgtgggaagaaaattcctaccacagtatgacaatgaggtatggaagtggttcgacatgtaaacaccatgaccacaggagcggccatggacaacttgcttgaaatgcaacccctcacgtagaatactgtgccaattatgcaaagcgctgccatgccaagcgaatatagtaggatgctttggattctgggccaaagaattggagttgaccgcttgaagaaagcgctgctctttgtcgacagcaccttgaacaagtctgaattgcatgtagtcgcccattccatctatctgatgccgaggctcatcgacatcttgcttgatgaaagatcgatttgaggcgacaacccagcgtaaaaggtccaatccagcaggggatatgacgtctctccaggttgaaagaagcttgccccttttgtcactcccaatgaatgtcttcatttcctcgatactaggtagtatggccaataggcaagaaatcatccactgtttctgtgtgggtgccaaatcgtctagattggtgtcataaacaacaaatctcacttgctggggctccacccctagcacctctcctggctgcactcgacggcctctactaattggacatgagatgcgaatatgatttaacgtctcgccaatgtgttcaacacgacagtgccattctgcaggttttggagtcttcataatgaggacaatccaatcgccgactttgaccggagtcggctgatctagccgaatttcaagatcggttgcatcaaattgcccgatataatttgtagaacaatctgaattttcttcaggaagtagtttctcgggtacgcgtagccgaagaccagttgggaagtcttcaagaagccccgctgaagccctcgcgtatgccaggctggttagcaagtcaacgacaaagggctgggactgaatctcatactcaaggcttgcacccaggcccagcgccatgtattggtagaggcataaatcattggagcaaacatatggcttcagtgattcgaaggcatcaccagttttgcagtggcaaactaagcaaaattctgtgcacttgacaaaatgccgcagggtaaactgcatggcaagaagaggaaaagacatattagagatattgcggtccagttcggtcatatgatcagccaaaaggatttctggcgtcgacgtggcccagctgtccggctgatagtcctcctcggaaaagtcctcagagctgtaatccctgccttggttggtctggaagaaaagttctgcccctgtccatgaaagcccatgttttagtcgaagactgatgatcccaagcaggcgctctctgataagtaaattgagcgattttccaatgaacagcggcctgaaaagatgaccacgtattgttttgtccgaagtcatactctcgtctttcgtccgttgatcctgtgactcctgtataacttccatagcgtgctctaaggatggcttgtatgagctgcaaaggccaacattcatctgaaccggtgggtttttcgaatcaattgctatctcgataattgtttggagttcatggtaagtcggtcgataacggatcagcaaaaccaaatactccgacggttcgacgccccaagaatccatagcttcctcggaaatgccaagcttggaaatgcggcaagacactgacacaataatatcgccatgttttaaccccaggtatcccactttgaatcccgcgttcttgatcacacgaaggtcacggcgaatcttctctcgtaacttcgtcttactttgagtagatgtgaatattctggtttcatcatcagactcccagcctggctcagtatcaccggcagtcgagtcgtcggagtcggagtcacgagagcctaggtcctctaggtaactggatgtcgaatcaggatcaaccatagagttggtgatcattttctcaatgttgcgcaacaattcatggatagttaagcctgtgaatgaaggcactgcattttcgagggaggagctgactgtctttggacagttctcggacgatgggaagaccaaaaagccatggtccctgggataatcgtgagagtctgcttgtacgtcagcaagagattagatccttgaaagatactatgagctagtaatattaattaccggaaactatagcttggagatcaagggtgaggcttgcctcgggtgctgcaaatgtgaaggaaattgatccatcatactcccctgttctgatatcggaggtacaggggaatcgtccagggaccgctgcatctgcgagatctcgcaggaattctttgcgtggcatagtacggtttgactgcgttgaaattttgaaaagaaggtggaaaagaagaagtaatgagacgcgaaagtcagtgtcaagagtcggtcaagggatcaagcctagaagtgcttcatgtatatcaaagaagtatatcgagcaaaataaagacacgatgagaaaagaatgacgagcacagaagaaaaacaaagagtaacggcgtaaaccatttggtgatttcaaccatgaccaggtacttaggcagcctcaggccccgattaggaatagccccactatcttaattcttatctaatcgggtcgatcggtcttggcaggtccactccggggcttctatacttcatgcattacggagtagacaaactcatacatgcaaacctacagacctaagctagatccaagtctacaggaaaataagagaggcacgaaggagaaaatcagaggttcgcttttgaggaggtctttgcgagtatcctccagagaaagcgccattttgaattctagttcgtgagatagtctaggtgctcccctcatactcacggtaagatgtatagaaagggctcgcttagggagtgtttcttgcctctgatgctagaacaattcagtccatgaatatgtgtcaacgaatcagcaggcgaagcatgacttctgtcacaagaatacagtgcaacagtgggcttgacattgaagacaatgcaaattctagcattcgaaactgatttatatctgtcaaggaactgttaaacttcgattctattattattatgcctatttcaattcgacctttccaagcattgcgtccgagttgcactacaacatctacaacggtcacgtgcatatcaaacaagacaaacattcatcaccaatacaagtaaggcttcatcaatctccaatcttttcagtaacacaatcatgttgccccctcgaagcgccatcggtcgaataccgagtcatatccggccaactcatctgcctcggatctccggtcccaacgtacatctccgaccattcacccaccgcacacgcctacttcttctttctccagcgccgggtcgccctcaactacccttcctatcacctcttgcgccgacccgtccactcccaccgctatcaatccacctccgccagcatttcggtcgcttgatatctaccgagagccgcgagcattacaagcgaagggtatcgcgaggtgtcaagatcggcctgtcagtgtcggccatccttgtcttgttctctgcgatacagctcggcatctaccaagaaaacattgagcattcatggcccacaccaacagagtggtcctggaaaagccgctggtgtctgcgatctgcgcaggcactgcagaatcctgagcagatcggcaagctgatgacgaattggcctatggtcgctgggtatcttcgcgagctgctcgagcgtctggagaacctagagggtgagggcaaaggcctcatagaacagggtgagggtggattcctggtcgaaggcgtcggccacactgggttcgatgtctccgcaaagagtgagccttggcgccgtggatatttccaggccctgatgggtgctgccaaggctgctgagaacctggatggctggttgacagatcgcaagcagaagatatctgcgcctgcggaatatgttgttggaccctcgaatcctcgaccaaaacccatgcccgctggccagaagaaggtcccacgggaagaggattgtgaggaagcgtctccgtctccggagcgcttctacatgaagatcttgacaacaaagggctttgacacaaggcagaaacttgatgctgccttggcttatgctgattggcttgatttcaaaggcttgggccttacggcgggtgacatgtataagtgggccttggacattgctgctggtgggttgaaaggagatgctagcaaaattgtggatttgaagagcggcctgttgaagaataatagcggagagctaccttcagagaatattctccgtgtctccacggccctcgccgtccacaacgctcgtcaagccaatcttcccacagcgttatcccttttcacatctgttctcaaagcccgacgcagcctccctttatcatcggactatgatagatctcggtcctttccaactctgcctaaatccaacaacgacccattctcttctctcttcaaatcgcttaaaaatgtcctcattcccgtgaagtacccagaccctctcccatcaggcgacgaacccccacgtcgcaccacggcatcagcctgcgaagaagcaggattaatgacctacatcggcgagatcctgtacgcctcctcgtcgaaggattccggtcttgcctggacgcgcgatgcagtcgacatggccgagtccacgatgctccaactcagcaattcagccgaccgcactgctcgaactcgctgcgcacagtgtctgaaagttgggctggagaattggaaaatcatggtctctacccttgttacccgtgctcgacaagaagagcagaagagcagggatcaggctaagggtgcttggtttggcggcgaacgccgcgtagaagcgaagcagctcgatcgtcgacgttgggaggctgaagatgctattctagaggatcggattcgtcgtctcttccctctcctcgagggcgagtccgggctggatctcctcgctccaaatagctctttgtttgtgtagtgttattatctacttgtatacctggacatttttggtggagttgaggtgacttttgaatatgtacaacatacagattatgttcgccatggcggtcaattttgttatccaatcagatttcccgtatatcaaaacccgtcgagctttgtagacctctgtactccgtacagtccagcgaagtaagcaaatcgacgaggattggcaatatcctatgttacaagtgtctatcattgagggttgactaaatcgaataatgtagtgtatgtcacaaagaaacaatatatttttctaagcgcgaagacgttcttgctaccttcaagagttcgcaccacagtttctttgtggcctgagttctatctcattgtgttatttgcgtcaacctcatcgttgaagttatatatatataacccgggacttctaatgagtcaagaaaccaacaatccgagcttcatgcgctttgagggagtgttcttgtatgaaaatgaagcaaatggtaagaaatatttcttatatttgaaacatatcattgtagacctattgagagacgtgtcttggtcaaatagtctagtcacagtctctacatagcggtattggggattacgatcagccgatgcaaattggaagcataggctttgagacaaatagatatatgatccaaaaagagacaaaagaaatagcagcaagaatgaatgttgactagtacatagtaagcttcgcctcgctctgtcaactggaccttgagctccccaagcatttgactgtgtttccacatgggaacgacagtgtggtatatgtacatggaagagccaaccctgacacacactcaatgatttcctggcggattcgaaggggagtctcgagtatatggaaagattgcgagcggcctaatttaggtggccttgtccttgttgtggtagttcacatcggagttccagctgtagatgagttagtcctggggtttcagggggtgatgtggaatgtcatgcgatccggttgagaaagcagatcatcagatgtaagattgcagaagctgctgttccgcagaacaatgtatagtatgtggtggggtggaaagtcggaactcacaagatggtctattccggacatagattagctcgagtcttcagcacacagcataattggatccacataccttatcaccgtctccccaagggaagttcttcgtgcggatgttctggtaagggtactcggtgcgctcctcgagcgggggcatgtgcgaccagtgctcccagtgctcattccagaggttgtaggcgttgagaccaccaccaatcaggcagggaatcacggcactatgaagtaattaagttttaggtaagagtgtcaaaccaaggagtggattgaaacgtacaagacggacagcttgagccagaggcctgtggaataatcgggtcagtaatggatattatctacggccaatgaccatgctgcacaatcaattgagttaattgtagggtacatactgctggtagaggcagcatggtgcttgacggcagctctctcgcggttgaattcgttgtcgacgatccaagaaggcttcgcttcggcgctgttgaaacggcgctggatggtggagcggaccggagcggaacgcatctgctgcgaagcacgctgggaaaggcgaccgatattgcgttgagggaacatggtgggtgatgctaaggagatctcttagtggtgaaggtcaaaagtggtgcgatgaggtctgaagccgtctttagcgtatccccgtgatctcccggattatgtaacctgatgtcatgaggccttatatatcaggcagacacaaggctactagaatcacgtgatggttttgaatatgtatgaacgtcgggatgcaggtcccgcaaccaattaactagattgaataagtaagggtggctctaatccttggctgactcgatcttttatattgtatttcgacctgtcttgatcatttgcatcgcaagaaatgccgcgttgtccccggatacactagcgcgtccaacatgggagttcgcataaccacgtggaatggtaagtcctatctgaatcatcgggagctctgagtagtgaatatataccaacggcgcataaccttttagtcaatggtatacggtatgaaagaaacctgctagttgaaccggttcaacactaatataacaaaagaaacccgttctcctatgagccatggagaggaacgcgcacatttgaggtaagtgtatatccttctatttcacagtagccgagcttatctagtctaaagtctatgtttgatatactggaggcggatattgtaattctccaagaaaccaagattcagcgcaaagacctccgcgatgacatggtcttggttccaggatgggattgttatttcagtctccctcgagtcaaaaaaggcaagctaatgctccattgctatatatacagaagattaacagcttttaggatactcgggtgttgtgatctacacgcgcaatgccacttgttctccaataagggcagaagagggcattactggggttctctgcccaccaaaatcctcaacatctttctgcagtcttccagaagagcagcagattggtggatatccaacgttagatcagctttccaggcccgcaatgaatctcgaggggcctgactcggaagaggagcaagagtatgttagctcggtgcccaataccacaatagatgcaccaaacctcgactccgaagggcgttgcgtcattctggagtttcctgcatttgtccttattggtgtctactgccctgcctatcgggatgagaatcgagatacctttcgcatggactttctcaatgtcctagattctcgaatccgaaacctgattgcgatggggaagaatgtggtcgtggctggggacatcaatatttcgaagcagggcattgatgctgctcatggaattgaggccatacgaaaaggtacaatgaccgaggaagaatttatatctgcgccttctcgacgcctgtttaaccacttgatatcggatggcgttgttattggtgaacgtgacaaaggcagagaagatcctgttctcttcgatgtctgcaggtcattccatccaggtcgtgcaggcatgtatacatgctgggaccagaaactcaatgctcgaccagggaattacggctcaaggattgattatgtgttgtgcagccttggtatgcggagctggttctccgactcaaacattcaagagggactgatggtatagacttctcgcatttatgatgtgaatcattgactgactgatttctagggatcagaccattgtcctgtgtatgctgttatcaaggagtctgtgaaccagcccaaaggcgaagtaaacgttcgggatattctcaacccgccaggaatgtttcactgtggcaggcgtcaacaggaatactcaaacgagtgcgcattgcccgcttcggggcgtttgctccccgaatttgacgttgataagcgcagaagcatcaaggacatgttctctcgaaaaccaaccagcgttccgtcgagggcggtagacctagccaacacaccggctaacattcccacgactcgagtcacagaatctacagacattcacgcagccttcggatccactgactcggccaaaaaaatctctgcgcctatcactgcgagaaatcaacttcctcagactgtttctcgcaaacgttcgcagcctctacctaccacatccgcgaaacgcaccaaatccgccgtatcgacgtcttctgggggctctgcggcaggccagaaaatgttaacaggcttcttcaagccaagggctgttatatctgaaaccacccagtcacctattcctttatcaggatcctcgacaccatcactcaatcccgaaccatcaggacagtcacaagagaaggggaaatatccagagatcagcctgcagtctccggggttacaagaagaaagcataagagaggaagctgatatttctaccgaagggccaacggccaggaagttcattgacgacacaataattgacccgattgtcagcaaggaggattggtcaaaactttttaccaagaaacctgttccaccatgcgatgggcaccaagagccatgtattagattgaccacgaagaaacccgggatgaatcgcggccgctccttttggatctgtcctcggccattgggacccagcggagaaaaggagaagggtacgcaatggcgttgtcccactttcatctgggccagtgactggaactcgccggttgcgacgcaagagcaataacatacatgtcccaggaaggcagatatcccttgatagccaacagagttactggaaattctacacccgagtatcgatattcatacgttgtaaatctagcgaggttgagccccggacaatccaaagattaggcgtacgcatgcataactcatgaagactgcttctgatgtcctgttgtcctagcaataatcaacgagtagggcactttgcatgctattcaaaaggatgtcatgtactcaaatgccagcatgtagcgggcaatccatagcgcaaacttcattgaagtctcccaggtctccagccattttccctagttccatttgtggactagtagctgccagtttctttgttctattgtcttctttgtttacctgggctttatttgtttaatttattgtatttatcgagttgatgtcccgattgggcatttttctttttttcgatttaatttcgttgtttgattatttattattttattattattttattattttaattagttaatcatttaattaattattatttcatgagtcacttcgtttgcccgttgccatgggaattcgagtcacgatacatttgagtcggaacgtcgacaactgactcactcccatattactcatagtttaaatcattatttcacaatgaccgagattatgcaattagaaacagacttcgtagttcaaagctatgtattttgtgcaaagtttggtatgttttttaaagttacatgtggcagcgggatacagcgggagctagtccccggatctgcagtggcacgcgccatatgcacatcaaccgtagcacagacagagctagtatagatcgaactacatagtatatcttcatgaactattaggatatactattcattgtaattattaggtagagcagcatatcaaacacgtaatgtacggttacaatccgaatggacagtccaagcatctaaatagacaaaatagtatacgacctgtttgtcgcactagtacttgatggcaaggtcacttgtagcatagtcatatccctccagaattgactttctttgttctactgctactatgcctaatggggaagtcttctctgaggatgagaccttgtgattggtgtcgctgggcaaacaaagaaacacgtctctcaccccgccaaacaaagaaaccacccaactcggcacctaccttgttctgcgctcccagcccctccgggactatatttgtttacctcgcgccttgtttcttcttcttcctcttccctctcctctctccatcccgttctctttttcttgcacttcacatccaaattttctatcttactacatttcattacaataactcattgtatctatcttttcagttaatcttgttcatcatggcgaataccctctttgagctggttggtgaggacgacgacatgtctcctcgccgtactatggagctcctttgggcagatgccgtcgcccatcttcctcagactgatggtgaagtgttcctgccgcgcaacgttgttgatgacgtgcttgacatggatcttctcatggacatggcaacccgccttgcgtaagtcttgaccagtggctatttggaccatgttattaacgagccataataggagcatgctcaacaagaaagttgacattgttctcgatgaatccattgatgcttaccgcatgttccccaagcacatcgcagcggagaatgatgaagatgtgtgggttgaatcgcatggccttgagctcgatgatcaccgtcggatcagcaagtctatttacaatgctggcagctctgtgaagctccctgtccgtcctgccaaagttcctcgtccccccaactgtttcattctgtaccgccaggccaaccaccacttggtcaaggatgccaaccctggtgtctccaacaacgaaatttgtcagtctcctccaactgttcttgtcttgtttctagctaatgaatgaaccagctcgtatcctcggcgcacgttggaacaatgagagccccgagattcgggagcagttcactcgtctagctgatgatctgaagcgggagcacgctatcaagcaccccgactatcagtacgctcctcgtcgtccctccgagcgcaagcgtcgcaccccccgcgcccgtgccagctgtctgcctgtcgcccaggaagattccaactacgttgatgtcgatgaccagttgatgacaatcgatgacaagtttatgtctgagttgcacagcaacggttaccttttcggtccgaacggtgtcgagccagtgtccgcccctttcaccaacgaagaatgcttggaaatgagcaatgagctgctttcaggcaacgttcttgcttctctgccatacatccctatgttctaaatggcccttgtaccttgaccgggcgcgacaatgttgacaatcatgcaacaattgtctactttcacttcttggtgactctccggtcacgatgagattacaccgataaatctcagtcatcagactttcttttcggtttctactacgactcacaaaaaaacaaaagaaaaaaaaaaaaaaaaaaaaaaaaaaaaaaaaaaaaaaaaaaaaaaaacaaaaaaaaaaacgaaaacaaaaaaaaaaggtccctttgcatgtattttggctcatgacaagttttcaggaggagagtcgactgggtttctttcccacggggttttcctggtcgctctcctcctgccgagtgagcattgttctgtacctaacttgaaatcaattagtgattttctcaaacttctttctctcttgtagcacgtatattctcagatgaatatgtagaaacgcatctaggacacgatcgcaacctcttggtatcacaggtgctcagtgacatacttcgacaaccaaccattcccaaatcctatgcttaccaaaattacgaaccagacaccctcagtttctcactcagaatgccactgggcctatttcactttgatctcacagctcgactacacagcgacgcccagagcctcgagtctctgtctttgtgcatgaggtgacgtctcgatactctttgttcacagccgccgctaagtcggcgccacccgcggatcggcatgcactacatccatggttccaccagtcgggtatggaccgagggagacaacgcttggcatgccgcgtcgagcaagggacatccatgtccggccatgcgaccgtgcgaccgtgcgctctacaggggtatctatatctaccggcgctaggacatggacatggacgcaggggagtggatctacacatatacaacaaacgcactacaatgattcagggaactgggtaagttgcttgtattcgctatgggaaatcaaaacaagagactaactacgggattagggagaagagcccagaccgaaaaacgcaaagtgcgagacggacgaagcaaaactcctcaaaattgggatgtggaatatacacagacagccaagagcgaaagacagatgcgacggtttccctaatcttcctggtatgagatcttgcgcatttcgcccagacgctggcgggcgcgagcgagaccgttctcgagttggaggatttcgacctgttgggaggagacatattagcattgcatggatgggatataagggggaaggggacgtcacatacctgctgctccatctcgcggaccttgaactcgtgcgagctcaactttccataatcctctccgtcatcgccgtcgcgattcttctccttaatgatgtcctgcacttgtcgcacgagggcacggcaagcagcacccactgccttgctggcggtctccaggcggtcctgggtcttgctcatgaatgttgccttgacgcgactggctgcgacaagctgggcagtgctggctgcaacatcgttggaggcgacaataagttgctctggcgagttacggcccgagatcacaccgtccgcagtctcgatcaatgtgttggtcgaagaagccactgctttggcggcagagatcaagccctccgtccaacggttgttcttcttgtagaaggcagtgcgagacgagctaccacggccttcgcgaacaatctcttgctgggtctctgtagcggccttgatcagctccgagatcgcgttggtgacggcaatagcggcggcaaggatgacatcgttgatgcgcagctcgtaagtcgagaacccgtcacggggcttgttcttgagcttggccagacgctgggcagctgcgtcaatggcatcggcggccttgagcagctcctggtcgacaagatcacccaaatcaccactggtgctgatcttggtattcttgggagcgaacgattcaacaagcttcgacagcgcctgcaagtcacgctggacttcgaggttgttgttgatgacaacatcagtcttttgcagtggttccagaccttcgagacggaacgactgcaagctacggaagaaccgaacggtcgcttgagcagacttgcgtgcagcattaaccaggtgatcggagctcttgtcatcggtagcgaagcggatgaggcccttggtgttgctcaacacatccgagacagatccagagaagatggacactgtgcggataatctcggcatgaggactattggggccatcggcaacaaagttgttgaaagctgttgagaactcagtggcggaagctgacgccttttcaatctgcgaaaggacatatggaggagaggcattttggttaccggcctgcatggacgagtccaattcatacagagcatcatcgacacgctgcacaccagtctgcagcacggagtcgataatatcgttaatcttcgcgactgtaccgtgaagcacagtgtcaatctggctgtccagcgcatggtcgacatcgccttggctctatagttgactgtggtcagtatgcaggcattcaatatcatcaagatcatcactaaccagtctaagctcctccagttccataagagcctgttccataccagacttgtacacctcaatctcctcgtccttctcacgaagagacaggtcaagatcttcctggcggtcattgttgcgactggaatgttcgtccaatgcgcgcgttttaatctataaggtcagcataaatcacacatctcagcaagatggacagttactcactcggagggactcttccaaatcagccatctcccggttatacttggacagcaaggacgagatctcggttccctttgagcgttctgcattttcagcacgctcaagagccatacgaagctcacgcttgaccttctccaagtcatccttgttggttccggtcagacggtcacggtcgtgcagagcacgatcacgttcccgaatcatgtcagccagctccaagttcttagtcttcagctcgcgctccagcttctctcgtcgctcgattgcttcttgtgcggaggctgccttgagcttgaggctctttgtggtctgcagaagatctaggtgctcttgtcgaagctgtgagtacagtttggccaatgcctcgtacttggatctccaagtgttcacctgctcttgcagggatcgaatctgatcgtccttcgaggcattctgcaagttcaggttcgaggtcaagtggttcatctgctcctcaacctctttgacacggcggtcatattgctgcagcatcagctggtcgcgctcatactgtgcacgggcgttgagattctcctgctccagctctgccagccgaccttgggtttgggtctggtactggtcgcggagaagctgttcctgtgccaatcgctgctgttccgcctgcaggcgctgctgctcctcgaaatcgttctgggcttgctgttgggcaaggagttgctggcgttgctggtcctcccactgttgctgcaagcgttgttgttccgcctcgtactcttcttgctggcgtttagcttcgtttgtccagaaatcattgatcggctccggctcagcagcgaccttcggtggaggcgagggctggtgttccacttctttcgtcggtcgtctgggaagagctgggcgatcgtcatcctcggaaagcaaatttggtggatcttgtggcaacttcgggatggtgatgaggcctgttaggtagcgcaggttggaacactcatagtagaaccgaacaaggcggtgatgctgggcatcatatcgacctcggagtggctcgagagcttcatcctctccggtggctacaggagacatcagtcagcggctatttaacgcagattcaaggaccaaaggccacatacttgtgtgcatggctcgcagcatgctggtgatgaacttgtagatgccataactctcctgcacaagtggcaccaatgccgagattcgacattcgttgttcgtgccggactggaagttcgagaagatgagcttttggaaggaatcaatttgatcttgcaaagacatcaaatcggtgatggtctcgtagctttgtgactgtcaacacgtttctccattgtcgcaaaaaccaggtatttacgtacccttcgttcggatcattgatcaatttcagactaatgtactcctcatattcaaacaagcctgcgactgtcagacccccgcacttgacagaactcatcgaccatggacaacataccgttgaattcggggtgattgcgatggaagttcagtttcgcctcgaggaagaagacatactctcgaatgagcggcgcatatcctatccataactgttattataccgtccgttgcatgcgtcgctactcctcgggcagagagcaattgcgcagtcgtcctgcgtggaatccatacctcgaacgccgtcgcctccgactcctcgcatcaaactatcaatccagttggtatgttgctgcgcctcacggataaccatggggtggccctcctggagaaccttgtgtattgtgatcagggccttgaacgtctggacctcgtcggcgaggacgggctgcctatgaagaacgaagccgtgtcagccatatcgagaacaatacccctgaccacgtctttcaggtattccaaaacttacactttcattccagcccagaaagccgccgatgacttgtggtcccacgtatagacgatgcagcttcgcacatgtttccctacaggcgcggggggtggtcagttcgattcggacggggcaaagccgaggcggcatcaatcgtttcgatggagggaatggtaatattgtcagaacatacgtttgggagcggtttcctctgttggttgtcaaaatgtcagtcatcatgtcctgtcccccgtgtcggtctcatccccgattgactacttaccgatactggtggccttgcggatattgatggccaaatcggcctcggtcctgcgcaatcctttatcagacaaacactctcaaagtcccatgtcggtcttgcttaccgactcatcgtggccgttggggtgtgtgctcaggggggaggagggtgtatgaaggtcgggaaggtttgtcgcgttgacaagatcttgagcccggacagcgcacagacgctaagaataggttgcgctgaccggaataagcggatatttcgaatcgcaaagcaaaggcgaaaaagacacacgtgggagtccggacaatgacgttgatggggaacgggaaagttggcgcctgtcgggagtcttggcgacgcctaagccgatgcgggtttgggccgcggcttggattctaaggcttcatccctgacgaaagctgtctcggtctacgcctcacatacacactccaggctaggcagaaggaatacatgggctattcatcatggccgatctctacggtgtgcttggtctacttcgttcgaaacgacttaagatcggcatggatatatggaatatcggaggattagctacatacataaagaagccacataaaggacttgggatacactgtgcgagagagcgatcacatgcggggataaccaacccgatatggagactgctatccagcacagcaatatggccaagcagtcgaaaaaaaagtacaaagggcctcgccatccaattcgatggtcgtatgatctatctataccaagggtccttggtcctcggtccttcccctctttcgtgtctgggcgaaggcaacgagcattatggtgagggtgtttctactctttcagtagacgccagggtttcatgactgcctggagctgaagagggcacctgttcaacagagcacggcgattcaacagcaggcaactgtccttgctcctccaaccgtccttgcccttcatgattcacctcgagctgctcggcctttaatggtgtctcactctcaacaggagtcggggctattagactggagtctgattccgggtccccaggggccgggctatttggctcggactcttggggagcttccaccacgagaagttcgtcagtaccttggttagcacgcacttcagggggcattggtttcctgcgtggtaaagttgatggtggggagtgttggtctcgttcaggcactgtgtgtgctgctacaggtttacgcttgggcaattttcctgagttcctcttcagggcatatttgtctgggcgcggcaatggtgttccaagtggtggatgaggatggccacgcccaatcggttgggtaagcgtgcctggaggagtccgcgacgattcttgaccgtgattttggtcacctttaccaaacacgctccaactccatttcttggcagcggcggtggcttgcccgagagtcatcggacccgaaggcttatcgtcggaagatgtaaaggttttggtgatagtttcaattgtgctgcgtcttggggccgtatcgctgacaagggacgtggtggaactaccccgagagtttctcgagctggggaagcccccgctctccatgcgagtagaagaaggtctttgaataaaactctcatgtggaaaacgaacgctgtcaatagaatctgcaatcgatgacccgcggctatggagcgcattttctggtatcataaggccacctgtaggtggcgaggtgcccggggtttggttcggggatgtaggtggggaccggcttgatatctctatcatggcgcttgttgcatgactcttttcttcgcctttgctctccgaaacaagcttgtcaaccttggcattgtccgctgtgactacgggatctgcagcgtgggaaaaagtctgtgaccgaatagctcgaggcagcggtgtgctgcccggtctctcaacgccagttgaacttgcagttgcagtggaatcgttcgattgcagatccgatagggaagatttcacgcctttgcgcagcttcttcttgaccgttccggactcagaaaggacaggcatgctcatcgtgcgatcgtccttgaccctgagggcttcaatgggattactgtcaacgctctttggggtcgagggagctacgccagattcatctggtatctctggtatctctacctgagcactcgactctggagtgtctcgctgccagacaccaccgcggaaagcctggccgagcgtattatggaagggaacgtcgtcccagaaaggcagaacgatgctctctgccactgcttcgcggatcttactctcgatcgtgcgaaggatgaggctgtatgtgatttgtttggagctgacaatgggttggatgtccatttccatcttcggcatcgtttcgaaagacatccagatgcgattgctaggtgggggcttgaagcgtaccaacaaatggccttcaagtttcttcaacacaacggcaaggacaatatcgacctctctggccttgaatcgagtgcctaagtcaatacgcaccgtcgccgagatctcgacccggaagtttcctgtgtattgcatatcggcttccacgcagcaattgccgtccacagtcaagtccttgagtcttgggttggtgataaatggagccccttcacccatatcaattctctgtaagccgatcttgctgataaagttaggtttgttggcgcgagagatcttcttgacgatcttgctccgcacgaaagcctcatactcaggtgtccggtacatcgctaaaaaccaccttccaaggaaagcattgatccaacgcgtctgcaactgctcttcggatgaatgcagacgctgaaccaaggtgacaatatgtttggtatcaaactcctggggcttgggcgggcgatcaggcgagtcccacagccggttttgattctgcagcatggcgatatagaaatcctccttctcagacaaattttcagagaagaggtaaaacggcggagtcggtcctcctagatccccaagcgagcccagtcgccgtgagaggcagatggcgtttcttttgagccacagctctccttctgggatatccccttctccgccatatatggtcacatcgtggtgagcaagcgaaatgacataccgcacctcgacctgattcacgtcatcataaagcatcaagtggccatgtctgagcacatatcatccatcgtcagcaattagcgcttaaatagcagcctatacatccagacaaagagatgcataccggagaacaatgtaaaagacatttcgcgcccgtttcgtggtctttccattcgccttcgccggatcgatgctgggtgcctgctttcgatcgaacagactccggtacatggtctgatacacgctaggactttcggccgcgacgacttctcccgcgggtgtcgttctctccgggggtttcccattgacaccaccgggtacatattcacgacagacggcaaagtatccggcagcgacatcggactcgtgcgtgcgatggaatttctccgccagctggtctgtgccggacatgagactaaagtcgtcatcggtgggttggcggaccggatcgggcgctttctcgcatggttgcggcggttgcggtgccggtgggagggtcagataggcgtagaggagaaataaggacaagactagtggaatgaaagtaattccaccgagggcgtaaacgaagaggaagctagcgagcgaacccatcgggaaccagtcgatcaatgcgggcggatcgaaagctccatagtttgggagagcgacctccaacagcttagaaagaacacggcaaacaggaagagaccggctccggaataaaacgagcgatgggggacaaagaattatcaggcacaagtgagtgagttgaagggagttggtagcttccaaagtcatgacgggatgacgaaggtcaactgtgttgagacatcggtattggtgttttgtatctgtattactagtaaagtacttgctttagtaaatgtaatgctgtatttatattgtatttttaatacctactataatcttacctgtagctccgcttgtaccccacctgaatcaaccagctgtcaggaacatgagaagaatcctggaaaccaacaacctcacctgttactgttttagtcaattccaattgtggatggggttaatttagcctaaaatgggtattaaagaccttagatcagcgaaatagtcgataattctcctcttcatgcagtgcaacagtgactttaagacccgccgatcagataatcctgcattctataactatagacatcacactagcagagtttagcattatggacaagatctcaacatattttgccagttcttttatttagggttcatgtatgtatccatccatgattaagaactagcgtatataacatccatggataatgcgagaagagaagaaaacgttcctattggtgaagatcatatatatatatacatccaaccatctaagacatctaagtgtacatagcatatagaaaacaaaataaccgaagaaacaacagaaattgggcaagctgaaagacaagtatgtgtacatgggagcgcaatctcctctacttcctgcgattcatggtcttttcgcacatctcaatcagaccggtcttggcatcactatctgggaagtcgctgatggcggcaatggccttgtcagcgtattcctgggccagggcacgggtctgctcaacaccgttgctacggtaaacgagctcacgagcctagtaaaaccgagtcgttagtatcattgcatcaagcaaggtcacccgcgattttgaacacccaccttctgcacatcaccctccttgccgaacttccgtccaaccaggggaccaagctccgggttgctcttccacgcaaacaagagtggcgcagtggccaatccaagctccaagtctgcaccaactggtttgcccatctccgcctcggtgaccgtgtaatccaacatatcatcaacaagctggaaagctagacccaggttacggccatatgcgtacgaagcctcgataacctccggagcactccgtcccagaaccgcagcggaacggcaggacttgctgatcagactggcggtcttcaggtaggtcttctggaggtagtaggcaagtgtctcgtcggtgtagacgggtttcgcttcgtcttgcgcggtgttcttcagttgcatgaactcgccctccaccagattagcaataacagtggccatgagttcggtgacctcaggatcgcgcagacgagccagcgctaccgaggcacgcccaagcaagaagtcaccggctagcacggccatcttatttccgaacgctaggtttgcagagctattggcgcggcgtgtaacggcattgtcgataacatcgtcgtgcaggagagacgctgtgtgaatcaactctgtgatctcggccagccgccgttgtgaaggtaggatgttgtcatctcccacgagatcatatttgctctcggcgttcggggccacgagcgggttcatttctgggttggcgtcttcgaggatagatggtgcactgaaggaggaatcgacggggctcggtttatccgtgtaggtatggtgcttgcgagggtccaaagctgttgcttgggacatgaggagaacaagcatgggccgcatgtgcttgccctcactatgagtgtagtacttggcgaccttatccagagctgggtgacccgatccaagtaattgtcggatgttcttggtgaggaatttgagctctttcccaaccattctcaacgggtcgacggagatacctggaggcgccttcggcatacccttgaagatggcctgggccgctgtcacggcggccccaaatggtgaggcatcccgccggcgtgtcgggtggtatttgcgagattgaagagcaatatgcacgaagcggaggtcatcgcggaggcattgggaacagacagttgctcgtgatgagaggatcagcccggtggccgatgcagttcgagctcccatgctcaatgcgagggctcttcaattataaacgagagattccaaattaaaccataggaaaccaatcccagggaacaatatcgatgtgaggtgtctgcggagtccaaggacgaacaatcttgcgggcgggaagatttcgagctctctcgggtcggcacggacccggtacctacgcagccaagtatgactcggtgacctgctattgacacttctctacttcaaaaagatacgattaaggtgatattaatagaggacagtatagtctacaagtcattgatcactcagttatggcatacgattctaataaaggcacaatgcaagaaataattccagtataatagacacagaaaactgcgccggccatcttggtccccttcgtaaacatccgaatgaagaaccagaacaaggaaaacaaattgcacaattaacacaagggttgaagaaggccgctacgaggtagatacccatgcatgggaccagtgcggtagacggggaagaaaaaatgctgtatcgattatggaacaaccacactcctctttaaatggcatcgaaatcaccaccggcatcttcatcgtccatgtctccctcctggatctctttggcaagctcgcgctcccgttcccgagcttcttgggcactcttgagctccaggcggtgctggttcatggggaaacgcatagcctagatcgagtccatgttagtagatattattttagggatgttcagtgagagacggaataacataccttaacactctcatcgtggagggccagacaggcgcggatacgctcgtggaacgcctcgccaggctctctggtggcatagatgtcacccacttccttactcttcatgaatccgtgctcgtgatcaagcgtagcctcgataacaccgtctcgaatagccttggccacaatgtactcggcagattcttcgctgtcgagtccaaggcgaaggcaaatatcccgcagcgagatacgagagtaagacagtgacatcatgcgaataccggtcttgatgacattctgccgaagacgcaagatcaaggtgtatgtgccatctttccggaaagtctcactgtaggtgttgacaatgttgaggaacccatccagatcagcaacactgactgcctgagaaagcaacagataagggtgcatggcccgttccagagccggttggcggaagactgcacggtcaggaatatcacccatcaatagctcgacaacgaccaacaacttgttagaggcctggtagaacccacgagccaccgggctagcaggcgacttacgcgtagccccaatcagatgactatgggcctctgtgtattgcagctgaatagcacggatgcggccgaggtagaacagataccgagcaatctgattgttagaagcagccacggggaatgggttgtgcgagatcagtagatctgcctgtgagatatgagacgtggacaggtagttgcgaagcagcaaggtcatcacagtagcctgtgtatcgacatctttccgaagcacagccgtgcgaagcgccgccaacaatggctggcggatagtggtaacagccgctgcaggagaaggaggaagcggagcgatttgctcgaagaagagagagtagtaaaagtacgcgcgggcggtgagagaatccagcgtacgacggttcaatgctcgcaggcgctcgatcaagtttgtcgagaactggactcccttctgaatctctcgttggtcgaacaggtatatctggacgagaatagcaagatatgcatccacctcggcaagggtctcctgagcgatgggattcttatccgagtcaacttccatatccgaactagctggagcattttcgaaagcattggtttggccaagagcttccaaaaggaacgaggcggtagagctagaagcggaataggtttccacaatgacttcggcgaggacctccggggtgaggtgtttccgcatcgacgatatcgatcgcagaacacggagggtaaatctggggtcgaaatgggcaacggctcgctcgagaagggtaaagttggatttgatgtctaaaagcatgccggacaaacagacatatagttagacatttggacttctttgagcaacaaggaaaactagacgaaccttgaatcgccttagttgtcgggtcgacctctggctcggtggtctcgacatcctccgcaccttccatcgtcacatcgtcctccttatccttgccagacgatttggaacccttggttgggggcactacaacagtcatcttctcgttacttttgcggtccttgctggtgctggatgaggatgtaggcgcacctgccgtatctcccatctcaacatcttcggatccattcacaccgttctcggttgacttcgatccgttcgtatgcgacttatcatcgtctcccatgttgccgtttgatgcgccttttgcgtctttcttggtcggagctgacttggccttgttggcggcggcgcgagtagtgggcgccttgtctttcgcacccgggctctgagagttcgagtttgccttttcaccgttagcggatgaagaggtgtcggatttattgtttgatcgcaaagaacgcctttcggccggcatctttctcaagctgttgagctcggctgggcagccaccaagctatggaaggagtagggggaagggcgagtgagcacgatgtgaagatagaaagcggaaaagcaattccaaaagagccaagctgctgatatcacgagtctcgatgaagaaaaacttgtgtggacagatggatgaagtggatgggtgatgtgatgtcaagagatgggatgaacgggcgcgagagaccagatgagtgcttagtcagtaggagcttaccgcagcctcactcggcgcttttgctgttgaagctgttacaaccagaatatattgaaagaaaattggcaacaatagaataagaacaatctgtaaatctaaactaaatcagcaccatcgtatttggtcaaatttagcttggctagatgcaattactgatacccaggcatattctgaatttaatgcctcaggcatatatgcagctttccgagaggtaaacggtgcggtgcagtgtagagcgttcaaccactcatccttcacgatctaaggctctcaaaacacccacaacatgtcattgctcaattctcacctagaacagattagactctcttccaatgctatcgccgatttgccgttagtgcctatgatctccctcaaccatgttgctttgactaacgcaagcaagcattcaggttccctcccccacgtattttcaccactgcactgctgggctctcacgatataacagcattgattcgtgataccgaagcccacgaacgagcactcttccaggttgacccgtctaccaaagcccatggaccacaaagacgcgccacacgacgcgggactatgttccccgctgagaccgaaagggagtcaatggcaagccgcatttattcagcgcgggacaagcgcaaccagtctgcagtggcaagggtactgggacatgatatgatggaggagatcaagcgatcagcgggcacctcgactagaggaccccgcggggaggtcaacattgaagtgcttcttcgaggcgccgagatcctgtgcaatgtttagtgagtgctatatacctgataacaagtattgcttgatctaaccagctcaaagccccgttgccggtgcacaggaaaaaattgccaaccttcgctatcggcgtgagatgatcagtgagtccatagcgcagttagaaggccgggttgcaacgaatactgcagaactggatcatatgagacactcttatggagatgatgaagatgattttccccctgcaccggtggcacagccagagattccagaggtcactgatgaggatattgaacgggagttggctgaaatccggggcttggagcagaggaagcgaaggctcgaagaacgggttacaggcatggatcgagatttgggtggtttgataggctgagcctttctttcgcgatggttatattcctgccttatggaagaccttctactgacctcttgtctgcctctctacccaccaaacaaggacatcatgctctctggacacctccggctggataccacaactctatctaaatgaggagctctccaggttgatgactcgtccctggtttacactgccctgaccattggagacaatagggtctgacaagttgttatacttagccagaatagccttctcagttctgcatgctgctcatactgagcctttgtcccgagtgaggcttacttttgggtcgcttctaagtttcaccgaaaatgcgcctgacacctgcgtcaaggtcctcaccacccacagcctctggtgcccgtcctatccatgccaagttccctatgggagattttcgtgatacatacagcttttcatgttttacgatagtcatgaatatcaaggtaaatccattattcacgatattattactcagcatcaactgggttatttacaacgtactatagcagaaaccacgtactacatactagtgaatttcctctgttatttcttccaaggcatgtcaaatatggctgtgagtattccgtatctccaaaaatcatagaacggcctacctggacaaaagcaagcgcaggcttaaccccgagttcatatagcgccattggcccgtttgggtgtatgattggagaggttgtgagcacagtgcaaacgttgcttatattaccgccgtgacaccaccgatgcccgtacctgttaccatgtatatagatatgtgaccagcggtcgctattaggcggctgccagctacacaatatcatcatctcttccctcagctatcaatgcaatgaccggtagcatgtcgtggtatatgaccaggcctattatcttcactctgcattgatcaaatccctagcggtcttgtggttcttatatatcttctctccattcactcagatatcatccgggcgggggggacgcagttcctaggacgcctgcgaccattgaacagcttcatgatctttatcttgctctcatttgcgattgtacttctaataccctgttgctgctagtgggtgtattggtctacatggatcatgcaaaggaaggaagcaggatacacgcgtaacaaggatagtcggccgcttgtgtagcctgtcatgtcttctagtggtctttttatttgtctttttatttgtctttttggatgtctttttggatgtctttttttcgggtatttctccccattctcgatcacttaacaggcttctcccagagccttgaatttttgtggaatttcagaaaagttcggggcatgcaagcctaaaatatggtcaataacgaaccaatgaccgcgatgttatttacttcttcgaaaaagcaatatggccaggcccagcccgacctagcccggcctaaccacgtggtttgttttgctttttgctttcatttggtatatgtacccccgatcagcaagaggagatgtaaacagaggcgcaagacaacaaagtgtgtgcgagcactggagttgcccatccagcaagcgctccgtggggtggaggatcagtcttagacagctgagacatccagtagcagttcttttatagggtcagagagaatagctgtttaacgtatataggttaattggccctaaagccctgaaccgtcaatcacgtagcatctacacaagaatgtgacaacattggacctggctgtcctcgacagcaatgaatcaactagatgattccaaaatggcatttttgagtatattaatggttggagttgtatactattttgaatgagcagactggtgtaaaggcggtttatcagaattcgctgtgattgtctatagatcagtgaccaggcacgtgataatggttcgtgctcaggcttactcctgaagttgaccatgcgatatacagcaatagtacatagactagttgatctaaagtcgaagaatatcacaggcaatcaaaaatagccaaattatcatactaaataataaagatatatgaatctgcgagattgtagtttgaacatctctgttataaaggacggatgccaagaccgggcccaacctcatccgccgtcagaagtcgtaatctgccaaatctgaggttgattgcattcgaacttgcctgctctaacatctgcgcgatagactacagccttgcttgatttctaggcaacggcgatcggctatatatattaacatagaccatttcgtgacgaccaccctgtctccaccattcaactcctgcccttgaatcactagcagagtaccagcatatcaactcggatatggatgggtctcagggccaagttggccagccaatgggtgtcccacagcagccacagcactcaaatctcattcgaaccgatcaagtacagaagctaccgcacctcagtgaccagcagaaggcccagcatacccaactggtgcgcagcctctgggatatgttgaacacccgcgatccacagacccacgaataccaacaggcgcatacgaagctctcgcagctctcacagaacttgatgaaaggaatgcgggttttccagcagaatcgacagcaggcaatgcagcatcagcaccagcaagcggtgcagggacagccaggacaacagccacagcaagggacacagccggtacagcaagctacccagggagctgttcagggagcgcaggggccacagggacaaccagtccagcggacgcaatcgaacaatccacagacgattaatcagctcattccgcaaatccaagcccgggtcagcgcgctcaatttcttcctgcctccgaacgtgactcccgagcaggtgcagacatggatacctgaagcccggttgcgatatggtatcgctcttcagaaacaagaggttggacgagctcggatggctgatcttcgttcgtcatatgctcagcggcaggcccagggcaatatgagccaggaggaaatgcaagaattcaaaaaccgacagctggcagctgaaaagctgttccgagagggtagcgagttcttgaacaagttcaaggaacagcaggaaagctttaagcttcaatcgcagcaaaatccacagaatcaagccatgaatcaggcaggacaggggaatacgcctgctaatttgaaccaaaccccagtcgcgcctcccatgtcaacacaaaacgtgccaaatccccaggcaggagcggcagccaaccccatgcaatcaggacaaactcaagccccagctcctcacaccatcaactcagcggtcaacgcagcacgccaaactgcaatgtctccctctacctctcagcctggacagccaccttctgcgcaatctgctggaaacactccagtcccaatcagtgcaccgctgcctcaagtgcaacgtccacagccatcccagcaaggaactccaggaggacaagtcacattcagccaaaaccctcatcctgacggttccgcccccacgccaccagggcccccccaacaggtgaaccaaggcccacctcgtcctctctcgcaccaagctgctatctcacaagcagcgcaaacctacaccaaccccacccctcaacagcaaacaatgactcagcaagcccaggctaaccagcaggctcacccccagggttatctttcaaaccgtccaggcgaaacttccacccgtaacaccaacatggcaatccccaagaaccttcatgtctccacccccgagcccgtgtcaatgccaggctcgcgcccctctctttctggcggtcccagccacggtgccatgggtatgatgggccagcccgcgatccaaaaacaccctggctacgtcctggaaggtgaaggccagcgcgtgctgagcaagaagatgctcgacatcctcgtgcgacaggtgaccggtggcggcgaaggagaaatgctgactccagatgcggaagaggtatgtttgtcccgtttctccctttcacaatgagagataaatatgaaagaaaagatcggaaatattaatggtttcacagttcatcctccaaatggccgacgacttcgtcgacgaagtcatcacccaggcctgccgtctcgccaaactgcgcccttcctcgaccctcgagctgcgcgatatccagctcgtccttgaacgcaactacaacatgcgtatctccggcttctcgaccgatgacctccgcaccgtcaagaagccccagcctacccagggctggactcagaagatgtccgctgtccaggctgccaaagtcactcaaggcaagaacgagtaagatgcagatggtctgccatctgtcttttctgattatgctgcacacaacgcttttctttacgttttttcttctcttggaggtcaaatagggtgttttttctttcttctttttctttccccatcttactattttacccttttatattgtctcttgagaatatggcgtacctggtgtatgggcaggtctttcttcgcttctttcatttggccgcattcatggttgggacggggtcttcttggtcttttagttaggtccatatatgctttctggccgcccagtctatgcagtgcttggataatgaattttctatcctggctttcctggcttttctagatttgtttcggtccgtgtgctgttagtcttgtgtatgtatgtgctggccttgggctctactctacgtctgtccactccaatatagagaagatataggcatattgaatcaagccttactgcgcactgtatctaggtagttaccctctgtacagtgttactatcaagtatttactttaccatttacgaatggatacaacgaacagaaaaaaaagtaagttcccacgctgaattctgctaagttgatcatcctcagcagttaagaagcacgaatatcgggagacaacatgtggtatagtggttagtacagggtatggagagagactcgatcagggaagaagcaaatcaaagagaaaagaagaagaagaagaagtgggatacacaagagaggtacaaaaaggaaaaaaagcgctcgatgaacggagtgaggaccggattctgggcccgatggtattctttggctgtgagggcgttctttgaaaacaaaagggaaatgagaaaggaaatgaaatggttggtggaaagattggatcatcgatgtgacgttggcggaaaatatgacaataacactcattggactggagatgagacctggttatcatatagagagtgtggcaacggtatgttcgatcaatgagggtggaacctgtacagttcatgcgtgacccgcggacagtacagggtcgtggtaagcaatgttaaaaagaattaaagcgttcgagacggcgaagaaaagggggaaagagtcggtgaggttgggccttcaggccttgagtttggggctttgtccaaatgttccgagtaatgcaggcaaaaataaacaggaaacagacgaagaggtggagatgagtcgctcaacagtcaagagaaattatacacatgtcactcgtgaacatcagtttcttgcggaaagtgtttgggggaagtatgaggatgggaagatgatatgcctcgcgcagacccatgctgaggaaacaaaataggtggttctatcaagagcaacaagggggatatctcgctgaatacaaaaaaaacaagacaaagtgacgaattaaggtatcatggggatgtcagtatgtcagtcgctagaaagagctaacgtcgggccgggttgggagtcgggaaattgcgccggtcaacttccttgcctttgccgggtgccgatggaccgctgcgagggatgggaggcaatgccttgtctgatgctggagggccgtgtcggctgtgtgagctgcgccctccgacactgctagcctcgccggcttcatccacaatgggaagagtcgaagtcgggccgggacccccggcatctgctgggtcccaaacagtggctaatgttctaggatgtgtgacggacacgtctttcgatgcctccttctccgctgcttgcattgttctttcgacagaagaggatctcgaacttggcttttcagttgattgctgaggtgcaccagatgcggaaccgcgtcgtcgttcggcttcttcctttgacatggtgattcccttgatgaaattaatgaagcgctctccgtagctctctggcgggattggagaaatctgtccccggtcatgcgagagtcctttgaaaaagttctcgaatttcttggtggtcccgtaatgagtcaagcaatcaataataccgaggtaatagatctcgtcaccgggttggccattctcatgagtggctcggaaacctccatcatccgcgtagaagacatgatatttccgttcatcgaggatttcttctggcatcttcgcagctgccttgtccaatggaacaggccgttcacgtttgataagcatgcgcagctcccgggccttgcgttcattctccaatttcgatggagtgcgcatcaggttgttgggagtcggagccgtatcctcttcgcgattacctcctggttggaagacctgaagcgtcttgtcacgcaatttctcttcattgcccctacctgcatcatggatgcctaccagaagagaatagtccattatcttgagcctttgaagcaacacaacgtcgcgtttcaattgctcaaggaagaattctcgttttgccgggccacattctatgtgacggttgcgacgaacccagttgaggtccttcatagttgctctagggtttctttcaagatctgactcttgtagatcacggccaaccgtcgagcccttcaggtcgaatgtctggtggatatcccggtggggcgggaacaggttattcatcacgacgaagtggatctttcggccgtatgccatcttgactcggtgcaatccgtagaattgtgagatgagagtgcttgggttgttctccacgtgccggtagtactcaggaagaatcttccggagaagcttgtgctcggaatggtgaatggtcttgataatgtacttgtagtcccgcgagaagtaaaagaaactcccgctcttgccaggggaacccagttccgacaaaatgtacttgcttgtgagagacataaggtagtcggcaggatcgaggcgaaacttggcacgaaggtgtcggaatacccaaggtgcgtagtctttgaacttgaagtcgtatttggcggagggaatcagttcgttgccggttctgttactgtcagtcatatccaaattgtcaacattacaaggggtacacacatgtcaaaggagaacttgtgcctggcattaaagtccgccggggtgagttcccggtccattttcgcgttgattctcgagaccgtaaagcggataccagtcaacatgttgtatgcggttacatagttgacgtggttctggtccaccttggtgcccacaatcacccggtcgtcgtcctcctcttcgcgacgtcgtcgcgaggctcgcttttgtttgatagcttcggcccatcgggctgcatcttcatccggcggtgtctcatccaaagtgatatcttgctgggtgctggttttcgttgcccgtcgaataagaccgactgacgcgcgtcggaagccggtcgtcggtgacattcggccagtgctatacgcagcatcatcattgcattctgcgctttctcgtcgaacactaggcgttcttggaacctgcaatgaatttcgctgtcgcatattagagttctgcgattctggcacgggagcgacatcgtgtgtagatgaggcgggtggggaggcatgacgcggttggctgggcttcgaatttggtgccaggcgatcagggtctggagaaaaacggccggtctcatcctgctgcgggatctgtaagagcgaggccgacggcgagatcgaagactcatcgtagggcggataactatctccattgaccataagtttcccctgaacaggtcggccatttgcagtgccattgggttgttgactagaaggggatgtggttgtggagatagctcccggtccagtgtccgaaggttttcggtccagcatggcggacggccggccgttctcgcggggatccctgacgggcccattgcctaccgactgcatgctgccgtccttggacaggggcgggtcgcgcgtgtacgagccgacactggagcgagggccattcagggagtatgtactaccgttcttcaggtcggtcaaaaggttcctgtcattctgatgagagtcgttattcgcgtcgtcgccgttgggccagttagtccacaggaacgtatttccgacgggggtcttatcatgcgactttcggactgattcgaacgagcgcggatgagtggctgtggccgtgactgtggcagtctgataggagacgtcgttggagaagacaggcatattgaaatttcagggaacagggtgacgtgagttctgcgtggaccggcaacccgaagtgacggcagtcgcccttattggcggagatccaggaaagttgtgaaccggacggagaaaggggaaacaaagaaagtatagagccaggtgcccagggcgaggatattcaaccgatcaacatcactcagtcaatgcaagggaaaggggagattaagggtaaatgaggtggtgaaatgggggaaatatgggggggtgggaaggggaggaggaagatggttgtctgggagaaaagaattacacgtacaaaatgtacgcggacctccacttcacatgttcctacattcaatgattctatatattagatgttatgctatattctagtacggaggagacatggccacttttattctgattctttatgtagagaatatgtgttctgttcgttgtataaggaaataccaaggtattaggcatgaaaactcagatgtttgatgagcgtacaacatcacgtagtttagcacatcatttccatatattttcctcctttatattactgactactagtgaactagtatcgctttcacatagttactccgtactgccagtttcattctcttcaactctcaaccagttgcatatgcaaggaggtcgtgttgtacaactctatagaatacagtctctagggagtaagttatcaagagatacagttacctatatgttatacatagtcacctataataagatatatcatctactataccattgccctgggccaatacccatataacatactccgtactccataccaatacacgtggagatgcagagtggcgaccaattatacgccaatgagcctatctcctgtccctgaccttgtaatttcttgggtttagggcagggattgagtagatgttattgttcttctgcatctttttctactgtagatgttatatactccctatatgtactcaaagaaaagcaattgttccaaaaatagggctcaataatgaaatcttccgcatctgcgccacaggggaaattctccacttcaaggccaaagatacaatgatacaatgatacaatgtggtaaggatcctctctgaccggcatccccgtcgccgagccccgacctgaacaaattgaacatccgagccgagagaagagtcatactgtacggagtagaaaggtgcgatattataggtgcattcgtgtgcgaaacagactgaactgctaatgtccatatcggagctatctataaagacatgtgctcttctccctcacctctacggagtaccaattatcccaaatttcacttttcctggcatatttcgtagcttcaacccatggtccttaacatcggtagcgacataaccattcagagattgctatcatgtaccttgcgggagtgttacattgatatgtgcatgttcctgtatgcgaatggcaaggtaggatcgcacgtcctaaatcgccactttgtcacatgacttctgtagcccgcaaaaacacggatttggtagtgaaaatccccgttatggaaatactataacaagtatatgactcccttgatttgaccatctgccaattctatcgtcaattgtagatgtataaatcatttctaatactattactattaaatagaatactcttatgattctattcacgataaggcctcgggccgtgatctggttagcccccaccgagtgtacccacaaaatcccaagatcacaccaaatagcgtaagattgaatcaaatgggaatgagttaattagatttcccttcgctagcacttcctatttggcaacgatgggctagtagaggccgaatctacgaactacgtggcgtacttggccatttccgtcttagttggatttatgggaacaaagaaaaagcagctccaccgcaacctcctacaacaccatccctatagttcatgattctggctcaatattgtggctttaattgtagaatattgcatcatccgggaaggtcctcgtttggcgtgagacctgatttgtctcgtcgtgcactatgttgaacctactcaaccttttcgcatagatatagatgggcaagaagtaaacctatcagaattggatgccgatctttctaaggttgttctcaaaaagaggggaaagacacagcacaatctcgcaggagctaaagtagtttttaccggggtagttggtgcaagcagccatatcaggcaagaagaggcatctttcgaggtcattatagttcaaacacggcaacgccgctaaatgcaagaatccgggcagagaacttggaaaaagtatttagttcttgtgttgacctgccagcaacagtgtcacaactgcccatccttccctcaagacttttatccacgtgtttattgcccactatcatgactatacaacaatctcccaaaaacaacacccgaaaggtgtggaaccatgagtttacctggacagataagcacttcacgcccgaagagctgctgccattgagacagcagaccgatgatcttgccgtcgatgctgtgaatcgactgcaggctattgctacaaaggcgaagagcaaacaaagcaacacgggacattgttttggtcgatttgacatgtatagtgttctgaaagaacatcatgaagaagacagtatgctgcaagaactctggcaagaagtaaacacagtccctggatgggttgactggacacaaattgaacgcggacaagagtttatccatcgctatatgatccccaacattaccggacttgctctgggattcctaggcggcaccgcagtgggtaatccttcctttgacatcgtctaacagattgctaacttcaaaagacaatcgcaggtggaacggaggtcatcgtcagaacggggggcttttccatccgtgtcctgcctagaagattcctcgaaagcttcctatggctattgcaagtgacaatggatctggagtctatcaaacccggtggagaaggacacacctcgaccgtacgcgtccgtctattgcacgctacagttcggaatcgaatagtgaagctcatggaccaagacccgacgtacttcgatgaagctaagtatggcgcgccggttaatatgagagacgcaattcatgcgacggctatcttctgctgtatgccgctcttccggcaactccctaagattggtatccagcctcgcccgcaggagacggaggatttcctagcgctgtttcgatacattgcctatatcatggcgactccgaacggcttctttgacggagctgaacaatcaaaggctactatggagagtgtcatgatgtgtgagcctgagccgacagagtcctctaaggctgttggagcgaatttcgtcgctgctatccaggattaccctggtgtcaatgtgtctaagtcaatgatcgaagttggatgccgtgtactgagcggcgacgaactggcagataagatgggattttcgcagcctgggatattttacagggcctctttcagaggatggtgccaacttcttgtggctgttaacgctcttcagcggttgtccccggcctttgatcaaatacttatgagggtgagttggttaaaaaaaaataatcgagacactaggaaaagaatgatgggttcaactaccaccagaatactaatggcttacagaaatcgaaagagttcgtgctcgtcaacgtgtttggggcgtcgattttgaaagaagggaacaaattcgagttcactcaccaaccacaactgaacaaattgaccaagaaagagactaagacagataccaatctctcctggttcaggccggtggagacaatcgggtttgttatgttcctatttgaatgtcttgtttatgccctggcctttggcttgccgggatatgttctctatgcaaatggcatagtctctcgcacttttctacatgtccttggataatgtgcataaatgcttgtcaagttctttcgatgacgtgtgccacttcggtcacttctgctagaattacatggactttaccgtttcttaccgtttttatctaattatagaatgggctaaataaagtaccggtatccgatcgtaaaaaccaagtatattaagggcttgggactttagtatcaacaccatggtactcgcaaagtaattttgtgtacggaatatacgctgtactattttgcattctcaacatagattggactatctcaagggcagtagaacgccaagaagccaggataaaaataactctgacactgacacttgacacgggacagaatgtggagagatctaccgtttgtttacaactttgacataggtagcataactctacaatttcagctcaaaaatccaaaaccaatatgaattccagtaacgatggaattaatcacaataccaaggtaataagaagaccgcagttccccattgcaaaccccaccgcaggacgccatccactggactttggaaagaagcaaagcccataacaaagatatccaaaaaaaaaactatagagaaacaaaaccgaggaaaccatcagagccactgcgatcactgagtccaaagaaagaaattacaagagaagaacaaagaaaatcagtaccaggtactctccctggaaatgcgcacgtgaaaatatagggagagctcaacctggtgaaaaacaaaggcatcaaagcctctacttcttggtggtccgcttcttgggagctgcccgggttgtcgttgttggctgaggggcagtagtcttggtgatacgtccagacttggtctttccaagaatcttaggctgctcaacaatagcaggagcctggaatgtttgttagtgacagagggagatggactaaacatctggagtcaacttacgttatcggtagccttgcgggccttgccagagttagccttgggcttggtggcggtggtcttcttgaccgctgccttcttgggagcggcagtctttgcgacagtagccttcttgggggcaaccttgggagccgcggcctttttacaataagccgggaacatagaatacttccttgatgagagcttaccttgacaatgggcttagcaggggccttggtgacaggcttcgccacaggcttaggagcggccttgacaggaacatccttcttcgcaagcttcagggggccagatgggcctagagtgcgacgcgtcagttaaatggtcgagacatgtgcaacgaaatgcagaaattggtcaagtcgcgcaaaagagaatataacccatgcgcagggtaaatattaacttacccttgggctgagtgaactcatccttctcaacaccagccttgatagccttgttgaactgagagtcaaagacactctgagaagtgacgttgatcttgttgttcgactgaacgtacttcttaatagcctgacgactaaaacaggggaaattcagtcagtggctgctttctgaaatagatggcgcgagaatccagaccgatccccgaggcatcggtgacggaaggaaaacaccagaaaacatacctgctaccatttcgttctttcaactgtacacacaaagggcccgagtcagcaatgaaatccgattaaaactacgaaattgatttggttgtgccatgcccaaaggcaaagacgtgtcacggtcgggcgcgcgacccgaatcacaacaaccagcgcgccggcagagatcaactcacgttaataatggcatccttgatcatatctgtatcacccgaatcagcagatgctcgcgacgaaattcatgtgcatatcgattttacgcgatgtggtgggcgttcaggattagtagagacataccgcggtaggaagtgtgcagagcaggcgccaccttcttggacgcgctggtaaccttcttgggaggcatgattgatgattgatttgagaagaggatgggatgaagaaggtccggttatcaaaagatgagaagacttgagaaaaaaaaaggtggtgagagtgaaagcagaagaagaaaaaaagagcagaagggaagggaaggccgcggggcatccgcgatttataggcgaccggtgttgacaagatcatcggagagatttagaaaaaagcactttctttgggtttttccttcttgcaagttgtcgtccagctggtttttgtttttaattaacgtggtgtttctcttctgtgtgtccttgcgagttgtctctttgcgtgttccaaccttggaatggctgatatggctgatgtctacaggttctctctctttcgtatcagatactgcaatatcatacattgttatatttctttcgatctctattggaatacctaaagactttgtgatattataacgcgacaataatcatataaactggtgaactggtgcttctacgcgtcccctttcccctcgatagaaatcgcgcatactctattttggaggctttgagggcgagccatatctctcagagtagggcagagggagatcatctgttatgcacattccaatgctgtctggggtaacccttccctcttgttgagccgaatctgaacccttgaaacctagaatctagtcgcgaggaacacagttcggagatatagtatgaccttttatatctacaacgttccttaacgcatcaaagcctccttgcttggaggggaacctggggaggctgcattgcctcgtgctaaaaggtcacgttgtaggtcaaagacctgtgacttgtgaccatggtaccgccccttaatgatgtcgagactcgccttatacgaacaaccttctatcttgaatcaagtagtgggtgggaaataggagatggtacttcagatctttttgatcatgtagacaataatgggaaagatagtagctaaataagcagacactccatgtaatacggataactatatatattatcgaaactaacaagacaaattatatttttctagcattccatcataccggtagtatctagataccataaaccataacaaacacaaggtttatgaagcccgaacttcgatcagaacccgggtggcacacgataactccattgtatatatccaagagaggggaaaggctctcacctcagctgcaacgccactacttaatcacatcgggatcaccaggccagccaatcaaagacgcggaatagccccaattccaccattccccgctgatacgcgcccctaaagttaccgagaagaaacaagaaaggtggccgggggcctgggatcgacccgccacagatgtatgagggaacgagcgcgtttgccccaacgtcgaaccaacacagacggatagtaatgaggatctattctcattggactatattcccaatttcctatcgcatgactctaattattggcccatcggcgtagctgggtgacggggatcaccgtatctgcatccgcaaccggcgcgtcgaatcaagggctcagctggcgtaaacgctgatcctgcaccacttaaactctttttgcatcttttgatggtggagattccttatggtacctggtgtcagtatatatcttctgcattcgaagtatttgctgctcatttcgtgaagatcagtcgtagttggtgttgtgaggcctcgagtaatctcgctaatcgggcccgatctatacagcctggacgcgaacactgattatggacacccttgagatagctacaccagagcatctggaaaggagttttgatatgctgaagtgttgagaacagatggaagataatgagtatacagattttggactcttttcccaactgtagcccccaggatcagacggaattcccatgtctgctctacttgatcttgtttgatcctgacgtccaacggaccgaaaatggttactggaacaagagagaagcatcggagtacatatttcttaagttatatttcaaatcagaccaccttttgctacgatacaaggaacttcatgccttgacccgatcccgaggcgaaacggtcattttccgcaataaaaaaaatccttatgcataaacattagaaacaataaaacatataacgccacgccagtccagctcatgttagatcaggaaaattttgtatcataagtacggaaaaatcatctctcgtcatcaagagactaggccgctccacgcggcttcgacttggcatccttcttagccttggcatcttccttctttttcttcttttgctgctgcagcttctcgtcgtgcttgcgcttgagagatgccttttcgtcctcagtgcgagcgacgggcttgaagaatccctccagtcgcgactgctgagctgtcttgagatgcttcgacagacgggcggcaccattgcgcacacggtcctcgttgaagcccttgtccccaaccaggtactcaatcaggccttcaacgttgggagcttcccacttgaagtcgcattcggggtcatcggcaggccggacgtcagggtggacaaaaagttctcgcgcatcttcgtatggccagtcctcaggaacgacaaatttcttcttcgggtcgttcttcatgaactccaggactttctctagagacttgtgctccttgatcaggctgagagcagtggtggctcccactttgggaataggctctaggtagtcacagcctagaagaatgcagagatcgatgaactagacgtagttagcaattgtgactgcgcgtatcataaccagaatacgtacctgtgggcggtccatatcgagaccctcaagcgctcgatccaagtggatctcctggataggttccttgcgctgctcactgaatgtcaagtgccgcaggagaatcggcgactcaaaacacaatgtatccatatcctctgatgcagcggcgtacaccttacctgcacgagccaggaccgcacattgtgcttcggcctccgtcggcgcgttaatataaggaattcccatcagcccaaggagctttttgcactccgcattgtgttcacgagtaacgcggacagtccgccgtgagaacttttcgatatcttccgcagttccagtttccttggcctcttcatgggcctcggtcgcctcggccttgcgtgcaacacgcttcgccaattcgccagacttgagcttcggcggcgctccatcgaagacgtaaagaggtttgatgccgttgtccaccatccgcagggtacggtagaacatgcccattaggtgggatgtggtctcgccagactcactcatgagctgttgaccctccgagcgcacggcgatcaggaaactgtagatgctcatcgacctattctgggttagattcttgagctaccgggacgatgatcgaatgacgtacgcatcctaattcggagagttcatgtcagcaactgaaaatatgtggtaggttatacatttcatacaattgcgaccttgcggccgaagtggttcttgatctcgcccgtcttgatcgcatcgggggcattctcggcgattacctggtacaggtctggtatttatttagcaagaggtatggataatcgggaatagaatacttacgtttaatacccatcttgaacgtgagcttaggttgtctcaagttgaattcttgtgtctgtgtagaagttgagcttgacctgtcgcagtacgcgaacgcgctgggccggaagcgcgacaccatttaaacccaattaggcatagtgtcatgcaatatcacgtgaccggtcaaatccggacccactcctgtcttatcttggcctgaatatgcatgtctgcctcaggcggccaaccggcaatgagtaattattcgggccagaaccggccggtgtgaagctgctccgaccccgcctttctgtattccccggaatgcgccagaaggaggatgagtccaacctccacaccaatatgaagcggaatcgcattcaattcgaggccaatggcgaggcctcgtctgcttctccccctcagggtgtcttcaccccggaggaccgccctcaccatgtgccgaagatatctagacggatacgggcatgcactgagtgtaagcgacacaaagtgcgatgtgatatgaaggcaaccgactcggtatgctcgcgctgtcagcgcatgggactggagtgtatcgtgaacaaaagtcttcaaacattgctggaggacgaagctgagtaagtgccttatcttgggtgtttacatcggtgacatatactgattgcgccgggttatgataggtggaaatcaatgatcgaatcggcaatgacggacctgctcagaaaatcgcagctaccggagctatcatactaccaagcaggcggtggtacagagacaccttcgaacaagagaggccggaaagactccaccgtctcgactgatgatactggacttgggcaacataaaagggccgagccagtcggtaatacagtaaaaaatggcgcagctggaaggtcaaattatggcttctcccaacaacagccacgatattctttagaccgcgaggaaactggcgcaacttctctggtcacagccccgatgggcagtctgtacgaggtgacacagctcagtgaaaaccgcgagagctcgcccggacaaaagcttgccccggaccaagtattggtcactgatctcatctcgcgcggagtggtcgatatccaggaagcggaggagttgttttatcacttcgaccaggtactcaaccgttacctatgggatggagccttgctagcacataaagacttgacgtctgtccgacgatcttcatcaatgctgtctgctgccattttggccgtcaccgcgcttcacatgccgaccaaggaacgcacgtttgatacatgctacaccgagtttgcaaaattggcatcagagtctatgctggaccaccatcataccctagatgatatccgcgcactatgcattggagcattctggcttgctgatgttagttggaagctctctggctatgcggttcgtattgcaaccgagcgcaacctgcatcagttctttcgcaaagccacacaagggtcgccagaacacatggaacaggcgaggctatggtatctactctatgtgagtaatatttgacccaaagtgttgttgttgttgctcatagttttcagaccttggaacaccacttttctattgcatacggccgaccaccgatgatccatgaagatgtcagtatcattcagcacaatgtctttacacaaaatccgtccatttcacaaggtgatcttcgacttcatagccaggtcgacctgttcatcattctcacccgaatgtattttgcattcggtccagatgtcgacctagaagttccagagagcgatttccccaaaattgatcaatacgatgttgatataggggactggaagtcagcatggcttcctagactcggtaagtctgacttcctgagacacagctacattgtctaatatgttactacagcgggaagtcgctacgtcggtgcatatccatacaaggccgtgtatatgcactatcatttctctcggctgcagcttaactcacttgctctgcgcacataccactcgtcaacctcctcaggacaaatgtcttatgaacgcaggaagcgtgctaacatcgctgttgaatcagccattgcgactctccaggtttgtctggaagagcgagacatccagctggcgctcgttggcgtcccactatatctccacagcatgatcacatttgccgcagtctttctgctaaagatcacagccaagatttgctcgaatggaaccattcccgggagccagggcaaacggacctcaatcgcctcggcagggctacacgttgacgtgagctacgtacgtgttctcgtcggacggatcgtcgagctcatggtctcctgtagtcagcgagcgagcgagcgccacctgagtcaccacatcgcccggggtctccgcaagatgctgactgggcttgaggaatgggagaagcgcactgctggtacccataccatggggttagctgcacatgaatcccattctcttttcaagccggtggtaattcctggagcgcagatgctgggtgagcgtgacactattctgaatcacccgcctccattgcttggtgtggcaccgctgtccgccgaacgcagcaatgggtttgaacaccctctgaccccagggaagcacgagcccggtctatcggaaggctcggttgaccctatgatggcggatctttggggatttgacgaggattatttccccacgggagtgtttgacttccttcagagccagatgccagcgtgatccggacttggaatgttttccctgggctgttctctttatacatagtaataaacggcctatgattgacgatcacggttgttgcaggagaatatatgaatattagaaacatacattagagtgaactactaattaagtcggactatatctccatacttccttaataaatggcattgcccagtacaacatatagttaagaatggatgggaattcgacattggacgccacttgatccccgtccgttcttttccttattttgattcctttccaattatcaccatgcgactaagatacatatgctctacggactccggagtataacataccttgtctctcggtgcttggcatagagccacccggtagaccgaaaaagtccgagtcggttgaacatgcggaaccaaacagcccatttctcggggattctgtcgaatcacattggactagattaatacaaaagccgacttactgttgatcttgtaattccgttattcctggtgtattgcactcggtgattccatttaccccaaacttgcaagactgccgaggtatccgcatatttgatccagtttccgcaacaattgacaactttattctctctccactctgttcaattgtccattctctgttttagctatgatgaaccgatctcttcttcgcgcagctgcgcgctcaatccaggctggtcctacctccgtggcaggccgccggtacgcctcctcggccgtcttcaattgggaggatcccctcgtcgcagcggacctgctcacagaggaggaattggcaattcaggagacagcacgccaatactgccaggataagcttgcaccccgcgttttgggtatgtttaattcgcttgcttctgtgaaatgatggactgacgtcagtgacctccttgcagaggcctaccgcaacgagaactacgaccgccgaatcctagaagagatgggcgacctcggcctcctcggagcttcaattgaaggatatggatgcgcgggtgtcagcaccgtggcatcgggcctcatcaccaaggaagttgagcgcgtggactctggataccgatcaggcatgtcagttcagagctcgctagccatgaccggtatctacgagttcggcacagaagagcaaaagcagcgcttcctgcctagcctcgctaagggcacaatcgccggctgcttcggtctgacagagcccaaccacggctccgaccctgggtccatggaaaccgtggcgcgggagcaccccacgcagaagggcgtgtacctgctcaccggcagcaagacatggatcacgaactcgcccatcgctgacatcgcgctcgtatgggctaagcttgagtctactgggaagatccgtggatttatcgtggagcgtaagcgtgcgacgcccgggtcgtacgagacccccgctatcaagaataagactgccctgcgtgcttccgtcactggtatgatccatatggataactgccccgtaccggcggagaatatgctgcccgatgtcgaaggtctcaagggtccctttacatgcttgaacagtgcccgtttgggaattgcctttggtgccatgggtgccctggaggattgtcttgcccgtgcgcgcgagtacagtctggagcgcaagcagttcaagggcaacccgcttgccaagtaccagcttattcagatgaagttggctaacgctgctacggatgctgcttacggaaccctggcggcgatccaggtggctcgtcttaaggatgctggcaaggctacgcctgagatgatctcgatgatcaagcgtcagaactgtgaccgtgctctggctaattccagaacgtaggtttctctgtcttttatttttgggttgctttactgacatagtattagtctgcaggaaatcttcggtggcaacgctgccagcgacgagtatcatatcggccgccatgtggccaacctgtttgtggtgcagacctacgaaggtcagagcgatatccatggtaagtcaaccctgcctgattgtgttgggctgaggctaatgcatgtttcaagctttgatcctgggccgtgccattacaggcaagcaggcctttgtctgaacataaaaagaacatatttgtatatagactatatcccaatcgaatgtttcaaagaggtacaccgcagttctaggagtagccagtaagacatcaggagctccccctgagaagtatagggtcacgctatcaaaggacagttccttcctctttgggacaagcgggaaattgcggacgcctcacccgcacgtgacatcatcgaggggcagtgtatcagtatcatgcggtgtaatacgggtttcaatacatacagaggtatattgaatgggagaggattggatatgaagtgtatgacatgactaaaattggacgtggccatgttagaaatgtgtatatgtgtctacccggttaggcactgctctctatgtatcaggctggtcacttgaaatatccacctgtctgctaatgctgtcttgtatacgggatactccatatatgccttttcctgaccccaaattcgatcagccctaggcattgcctttcatgaagcaatactcaatcataatatacacacatatacccttctatctacttctgcctcattctctaatacctcaatgaggtaacccagctgagtcatcatgtgtcaagtgggcgcccggtaattacggtattgggtcgtacaataccgacagaatcgattccgcccatgggggcacttttccccctcttcctcttgagactcccaattatcttcttccctcttctttttccacacaaaggcgtaatcgtaagatctgctttatctttcactctgagcatcaactgaccacccatcacccagcttcttttccactttcttcacctttctctctttgctcgtcatggctctcaagcgtattaacaaggaactcgctgacctcggccggtaagcctatcctgatgctatctctgctatcttcttgtggttcatgaatctaactctcctctagggatccaccctcgtcctgctccgctggtcccgttggagatgatctggtatgaactctgaaccctcgttttcttgctcggcgccatctggcggggcacaaccccggctttgacaatcttgatatcaatgagaagatcgtggatggctgacttgtcatttttctcttacagttccactggcaagcaaccatcatgggtcctgtaagttgttctcgtctgtgctttggaggaccttggggccatttggccctttgcgagctccggagattcatcaccagatccatgatactaatagatcatatagggtgactccccatactctggcggtgtcttcttccttgccatccacttccctaccgactaccccttcaagccccccaaggtcaacttcaccacccgcatctaccaccccaacatcaactcgaacggcagcatctgcctggacatcctgagagaccaatggagtcctgctctcaccatttctaaaggtgagcaagaccttctcctttcattctacacagtttctaacgacccatagtgttgctctccatttgttccatgctcacagaccccaacccggacgatcctctggtgcccgaaatcgcgcacgtctacaagaccgaccgaccccgttacgaggcgacggctcgcgagtggacgcggaagtacgctatttgagtgaaacgacaaatctgattactccttcgcttcttatgtcttctctatctatccctcaataaccctccttgcgacccctatttcgctcgaccactttttatcggtgtcatttcaacgtcgctctgcatctttccgctttcttgcccccgctctagattcagaatccgcgaaagcctggcgtacctgtggtcgtagaaacgttttcagttttcccaaactcagtgtgttaatttcaaatgcacctgttcttgcgcgcgtttgcttcctacttcggtgccgaaaactccatttgcgccgggtttgaccttgtttgttgggctgagtttctgggactttccatatccaacgatccttatgacaaattctcatgcattcatggcatccatttctctttttttcaaacgctccatgcgtctaggattgaattatggacactgccgagtttccgcaagttcttcttttgcttgtactagcgatgcttcagactcggtgggtaatgcttggggagtttcagagagtagttcgagatcgcccttgtcttgggtcttgcgcttaggggttataaggggctttatcttttcctatccaaatagcacaatctaggcagggcctatcttgtgtatgagcttttgatagtgtagactgtaatttgtacgtcgtataactacaacttcaaacactgattgattcacttgatgcattccaattgcccaactccaaatccaaactccctatatgtgtatgtatgtatatgtatctgtgtaaatgcaaataaaaaagaaatgaagagtagaaatccatcaaatcaactgtcgtaaaccatgcgactgaaccaaacccagactcaaaacaagtccaagcaagtccaggacgaaaagaaagaaagaagtaaaatgcaaaataaatcaaacctagccccctaaaaggaaaaaggaaccaggcagacctattcaaaacatgcatcatcaaaccgcctgacttccccgtcgactcccagcccgcgacccctccttcgcagtgcgctgactagcccgagaaacctgactcaccgaatccgccgggctgacacgatcatcagccctagagctcttcgagctcccagaccgatgcgagcggtggcgatgcggatgcaacccaacctggctaatcgagtcatccggcgagacttgcgaggcaacgtccagatccaccacgctctcaggaagcgggacgttccgcgcagagaaatgcgacttcccgccgtccctgctgtggatactcgggctggagtagaatgttgcgttcgagccggtggggagggggatgttgcgcgctgagcgcgaggatgaggcaacgctagcgttgtccttgccggcgtgcgagtgcgtgctgtgctggctcttgtgcgagcgtgacgtcgtgctctgcggcgctttgatcgttgaggagctgtgcacgctgcttggcgcgcgcatcttttcttcgtggtagctgctgatgaaggtggacggggcgcacgcgtagcgtttctgtgaggcgttgctggcgggtgggtactcgattgcccggagcgggatgtcttctgggatgctgtagatgctgccttctgaggcacggcgagggttttccatgtactcggagccgtcgtagattgtgctggcgcgagggttcttggaggttacgctgcgcgttagggttgagcgtgggtttgaggcggtggtgtaggcgctgcggggtggtgcaggtgcttcgatggcgcggaattgggattgttggtcgtcgttgccgaagaaggactgtgcggcggctttgagttgggggaagctgtttgcgaactgcattggttcgtgttcttgggccgttgactgtgagtcgcctttgaccattgcgtaggcgatcgctgctcctgcggcggcgccgatgagcgtgccgacgatggtcttggctgccatgctgccgtcgtcgctctggggcggtgcgtgcgactgcatggtatatgacggtggtggcgggccttggaattggcgcgagaccatagatggtgccgaccgctcatagactgagggtgctttggaacctgcgcgagacttggtgtctgatcgggcttcggatcttgcttcggatcgggcttcagatctcgcctcagatcttgccacggatctagtgtcggaccttgccacggatctttcggacatagcctcagaccttgggggtgcgatgctctccgccttggcagtgctagctctactgctcgcccttgagaccacagagcggctagaaccctccagcagagccattgtcggcccgctggcggcggatatcaccgaggcagcgccaggccggtagacggcttcaacgctgttgccatcgaagtcgatgacggctgcactgaagtacccagattgcgaatctcgcattttgggttcgccgtggatcttcgcgccggctttaagggcgcttatgaagaacgagccgacagcgtctttcgacggggctgggaaggcgacatggactgcgccaggaggacatctttggtttaagttagctttgtcgagagactgggtttctatatcactcacccaggcttagtctcggtcatccagaaatcagcaggttccccctgcttctgaccgaaccctatatagtcatcatgtcgaccgatgaattggtatcccaatggctgtaaacatgataaatagaaagaggtagaggtcgggaggtgagcgacagtcagggtgatatgcgagacaggcattgcgaaggttgaagtgagggtgcctggatactagcacgtagagtaaaagagaacagggatatgaaaaaaacgaaggtggctggaaggaaaagagaggttgaatggagtcggtaaagatatatacggtgaaggaatccaagtctatagccagaagtatgacgccgggaaacgaggccacatgaacagttcccccaagagccagtcagaataaatgccgtgtgactctaaaccaaaaacagagccgaaactaggctagcagcttccaaaatcctgcccaagctggcgaaaaggtctcacccagaacaccgcatgtctcccctcgatagtaggtgggcactgaggaacgtgtgaactctgtatggagtcaggccagtggggtccccgagacgattggccgaacgatcaagtcaatgctttggacccgatctgcacgggatatttgaaacggtccaggacgaggcgtgtccagggcccaagttgcattccgtgctccatacttggtgagcacagaaataataatgccagttcgtactcccagtagcacggtactcagaccggaaattgttcctgttcctgtgcttggccgctttcggatacctcggggcccaaccttgggaaagtgaaacgctctatggctggaagggtgcagatgggtccctgccaggtcatcgcggggagccaatgtggattcctgttggcggatggggcgtctgttcaggatgccctgagcgaggtgcatgagcctatcgacgttaagtggacattttgcttacttgttcctctcgtgtagcaaatggcggactttggagtggaggaagaggagatttgccaggtgggcttgggtagatgtgctgaccgctacggggttgagtcatatgttgtacagtagcagagcaactaactatggagtatgttgtacaccgtaagtcgatatttggggataattatgagaatatgatctagaatgctacgatctctacatctccaaatataaaatgggcagaagtgcatcgcctatcgccaccctcggtccgattcgcgtattcaaagtgaggcgaggctagttgcatgccacgtcaatcggaattattgggagaaagagaggtgaaagtaaaaagcaaagggaaaaagtaaagttaaaagtaaaaaataaaaaagccataattgtattgaacacagaagttgaagatatgtgtctcaggaatccccaaacgggccctgacctatgtgctgttcactttttctggtctacacatcgcagcgaggttgaagctggatggaggcaagacgaatcaaggactggcgaaaaggaaccaaatgccatccgacccgtaacggagggggaaaaaagacccaggtgctctctaaacacccgtacccttgggatgaaaatcccgatgcttggtagtcccagtatgttgtatgcagtatttccagttcccccaaacaaaacagagagatatagaaaggcagagagagctgggcttggagaacagccaaaatatggaacaagaacagatatatgcagagatatgatcggtagcttcgttccgggcagctcaatccccgcctgtaaaaaaaaggtgcctagcaaatgtgccgtcagtacagacgaccatgacgcgcgctcgttgggcgcgatcctttcttttctttttccagttgagtgtctcagagaatatcccagacctcttcggcagcgtggcagaacttgctgcaggccacactggcactaagactgtaattactgatactgatggtttcatccttaaaagagtccgcaaagtcgtcgtttcccttggccatggcaccgacgaagatggcgacactctcattggggttcagcgtctctagatagtccttggtgcggaccacgggcgcctcgaaactcatggtcaccttgcggcagttcgggggaagatggtcggtgatcgggttcttgataaccttgagaagcttttcttgcgagttggtcgaacggatggagagtcggtggagcagttgcaccatgagaccggcgaaccgcttgaatgttctcgggatacggacggaagggttgacttcgatcaagacgcccttggcggtgtggatgaaaatttggagccgaccggccttgttcacgggggagtcgagaagagtgagcagacactacgctggattagtggggattctttgaccttgctattgccactggcgatgttgaatcgtacctggtgggtaatatccggtcgggcttcactgatatcgcggttcattttgcgcatgataccgatgtgctcatcgctgttcaacagagagaacttctcatccttggttcctgaacgtccactggagacagccttgtaggtttccagactggcattggagaggaccacaatcaagcgttgggtgttcttgtcatggggaggaattggcatatgctgttcggcgacgagctggggaagctctggaggagggcatgattgggtccctggcgatgaaaagtcagacatggtgaagttgagaattgcaatttgggcgcggggaggggtaagggaaggggggggaaaggtgacagatgtggctgggatgtgatccgaggggatcaatgcccagcaatatgtcacacggaccaaatcagaatgaatccctggaagaattgatgttggattttgaagggttggagtcgtctgtagttgcggcgaaaaaaaatcaaacacagttgaagagattgccgcaaagcaaggggaaaaagacatagaatcaaaaggaatacatactcgcacgctttctctttccagcagcttgttcttggtccgacattgttggtctgaatgtatttgcaagatgtttgaagttgaagagtttttgggggagaaaactttcggggaaaaggcggccccaagaaagtcgagcgtcggaattatatagaaatctaatgcgtttctacgtaactacgcttctcttttattgtttgttagaatgtattcttcggactatttacagtctcaattgcaacataggagaatggcaggtaaaatataggagtccacgcgtatgtatatcaacatcggatattgtagttactcgtactcttcgatcaccttggaaattcccttttatgttagcttaacggcttagtgccagagatcgacattaactagcccctctacggggtccatgtctgtatacaattccaacagcgtttgaatcatccggaaagccacatcggcttctcttttgcaggttgataggtccaacatcccaataatagcaaagcgcctgacagggatgtaccaactcaactcacttgggagtaactccctctgtactagccctggtacactagcaaggttggtacctacagtacagagtcctctctggggcatgaatattgaatatcagaggattgagttcggatgatgaggatgtgtgacattcttgcataatactgcggtggtgactcagaatacactgatctgactggctcatgttctagcaatgcctcttgggggccgtacaccgagaggctgctacccagtggatgagcagggtcagcacagatgtgaggccatgaatggatcggaatggcaaaggtgatacaaggaagctttgtcactaggcagtgaatctgccgaacaaggagcagctcttctggtaatctttgaggcagttcagagtgcctgtgatgcctcgctcgtgatctggaccccgccggtagcgaccggatgaatgtgtatcatgtaggctccagcacaagctctttgcacgatgacatgccaagggctcagttgccaccaagtcggcactgtgagagtgaaatccggggggagcccatatgtgacctggtaaccttagccagctaacatcaagccaatcacttgagctcgggacttgacccaatcagcccggaagagtttgtgttgggttggcaacgccccagtattccctgtgatgaaaattaattgcagcctataaccggtcagctgtaggcgctggacatgaaaaaacagagcggtcaatgaggatcatcacaattccaacgtgggcttccttgcacgatgcaatacggggaggccttgcacgccttaatcagaggccaagggctcaggagagcgtcatctttaatctccctgactttggacttatcctagaccagagaagccccattggctggaattttcgattggagcctgtctgttgtgtgttcggagcactgtgaatcaatttaagtagaaagggggcgaaaaaaaagtgcccgacataccaaccacaggaattcgacaaggctggtgttgtgtgttatactccatttattgcatcttcacgtcttcacgtcttgaatttccccttcttcatcttcttctcttaaatctctcatcttccgcatttctccttggcccggtattaatcccggctggtggcgagactctcctttttttcacaaaacccagctctccaccaactattgatcgcttcatttctattttttttatctttttctccctgaacttgaaactgctctcaagcaaacctgaaatcctcacagtcagggatacaagtcctaagagctctggtaagccaacgctcgtcatccaaaaacaatatgtcctaaaacagactagcgtccacgcgtgccgtcaccgaggactttctcaacttcttcatcccaccgtcagcagcttggagcttgtcaggagcaaattctttggaaagtcagggtcatgccgtggatagttaccaattcatttaagaggtatgttggtgtggttctaatttacccaagggtagactaacatcccatttcagaggcctcatgaaaacttacggacgaccaacatggcgcgtctacgatgatgagcgcgccgcgaagaaaagacgcgtggatgactatgatgaagctgaggccaatctgcaatatgctatccgggaatcttcagctgccgtgctgtcgagcccgtcgcgtcgtaattccgtgttgtcggaagacacgcttgatgatattgacgatctcactacaccaccatcgtcgccaccaccaagcttaaccccaccaccagcaaacacccgcaagccggcatttgcctttctcaagcgcaagcacaaggaaactccgaccgcatcccccttgacagaggtgaactcgaatagcgtacgcgcatccgtggacccaccaaaacaaaagggtcagaaacaacctgtcatgcgccaaatgcagatcgacctgggaaatgatacacgaaagacctgtgctacctgttctatggaatacatcccatccaatacagaggacgcggcactgcataaaaaattccacgagatgaatgcgactgggatcgacctgggcaaggcatttatgcgtgccaacgcctcgcgttgggtttacgaagcgactcgatttgacgaggggtatgtggtcatcgtagaccgcaaggcgtcccctagcgccaagagccaagcgaagaaagtgctcgaggttgtcaataaagagctctcctcaccggatatcgatgacgagatcctctggagccaaacggaaccgcccaagcatttgcaaaagggctctcccgagaaagtagaccgttaccgagtcttcctgcacatgaaggacagtcgctgtgtcgggctctgcctaaccgagcgcatctgggaatgccgaccggtggtcaaggaacagaatggcgacgcacccaacggctctgtctcaacacgagaggaagtctgcccggccattgtcggagtctcgcgcatctggacttccggctcctcgcggcgcaagggaatcgctttagatctcctcgactgcgtggtcatcaactttatttacggaatggaaataacaaaggcacaaattgcattcagccagcctacggagagcggcaatcgcctggcacataagttcttcgagggtgaagagacatggcatgtctataacgagcagtgatggggttgacttgaatatgggaggtctttcttttctttaatttatctcacagcaatgagcgaggcatcgggctttgattgtgttctcgagcgtgtctttttatcttttatatgcttctgtaccatacctggacccttttcccgtgtaccatagggagctgggacgcattcgtttcaatattccaatttgactgaactattatctccgtacaagaacaatttgtacgtcttgtacttctttttatgcattttatttaagcctcgggcagccggactcgatctcggaaagcggcgcgtactgggaacctcatggataagaaactcggcggggacccctcaattcttctctttttctttttctctcgattctaacgtattcattctcgcgatgcctggatcaaatccttttcgtgttagaaacctgggtgagtattgttttcccctcctcttgagccttcccggtaacacggagtcataacgtggcgctgatgtcaatctggagacacaggcaatcccgcagctccattgtctaccaacccgggcaccttggcccctgtgccttctaagcctttgtccactccacctatagccccgaatggttatcccagaaagtcgtcgataccgctcgaacgcgaggtagctgactcgagctcctcggacgaagacacaaacccattcaacctgcgtgtgtcggcgagcgagagtgaggacaaaatcaatgcacataagagcccagctccccttgaggatgatcgacaacgagattattctgggtcagctccacatctagctccatcaacagatggatcccccatatcacccgaccacaacatgccgtctgcgacaggcgcagacagcttctatacaggacgtcatgcacggtcgtctatagagcttgatgcaagccccctcggccgagccagagacaagaagccgccacctccgcctaggagtcatcacggccgaagaatcggctctatagctaccgcagaatcatcccagaccgctcggtccaggtctactaaccgcctgtcaattcctggctcccctggaaatctgacgcttggcacctcgcatcccagctcggtgtctctgtcctcggccgactacttctcggtcactgtagcgacagggtccacggactcgctccagcgcagccagtcccagcataagcgtcctccgacgccacctctcagtcgacggcacagccagatgcggagatccaagtctacacagtccaaaattaccagcagattaaatatgtcttacgactcggagagcaatgatggctctctgcctcccagtccggacccttccagtcgggtggaaaacaagagactcagcatgcctccgccatcctcgggagacttccaggcgactgcgccgttgggaaatatctcactgaacctgtctccccccactaactccagaccatcatcactgaaggctggtcggcggacatcatcctatgggagtgtctctggaccacctccgcctcctccacctcggcgcactcgagactccattgcccgtagcagtgatgtgatggggttgaaggagaaccagtccccagccccagttccagtccctgttccagccccagccccacaaccatccaatgcccttgacatcctggctgatctcaccaaactgcagaaagaggtggatgatcttcgagggcattatgagaatcgttagtgatcgaagggggcagcaggctgttttctctcacgttttagtataggagattgcatacatgaatgaacgaatgcatgaatttggcgtagtgattaccagtattgaatttctggtaaacacctttatggggaaagatgggcgggacagatattaaccatatggtggctattagtgaccatcacgatagctccggtttgtataaaataggggcgaaatataactatctaatattcattttcgaccgagtaaactggataattcagtatctcgtcaagaacagagcccctctgagtggaatagccgatcaatagaccaggtaatctcctattaatatggtggcccgcagtattgtccccatggccgttaactcgcgcggtatacgccacgaggtatgacgtggggggaaattaattatttagttcgcaaagtccagggccaagtccaccctccttccctctttctctctcaacttctcttttgacaactctcgcattactgactctacttaatttctaaagaattaatccatcttcatatcttcgcatcatgaatactcccacgctgatcaatttgcctcctcccccatcggaccccgtcactccatcggatatgggaccgtaagagctctctataactccatcttccctgtctctatacgtagcatggagtgttgactgacttgctaatcaacggagaaaatcagaggcacccccaactccggcactacatcgctgtccgctctttcgacaacagccatcaaagatggtcaccagggccaaccattccctcacagccaccatgcgcaccagtcctccacatcctccacaaccctagaggctgaacgcgcagaccgcatctcccgtctagcgggccttgagcgcgttgccacagcccgcgccggtggccagacacccactagccagcttctgccatatgctccaggatacttcgagagtcaagcactgaaggagcgcagcacagtcggcagcgccagtgcgactggcagcatcgccgggcgcacaacctgggcgagcagtagcgacacatacgacgccgacaagatgagcgagcacgaggacgacggcacttccagtgtcagtaacgtcagtgatgaaggtaatgccagtctcgtcggttttggcgagggcgccaacagtacttacagcgggccgatttctcgtccgcctggaatgagccgtgtgtcctctggaggtattgcaggacgacctacttctatcggcagctcgaatatcaatcgcccgaactcgctggcttcatatcttcagcaacaacagcaacatgctggggagagctccatgagatcgtcgtcgccggctgggtcaatcactcccgagcctatcaatgaggatgctcgcatggtggatggtatgacttttgactcggatgtcgttgatactactgtcagaactccacgactagtttctacgcccggtcacagcagcagtggatttggctcgccagcccgggattagtgtctggttcatgctttggtagattcaagaagttacgaaggcgtttttctttagtggcttgatgcctcgaatggatagctttttttttttggtgtctgtttcgaattagcaatgactacgcatgtaattctgagagaaacctgtgtattgagactcttctcttccaattattcaacctgtcgttggtaactacctgggtcttcactctaaagaccattgccacctgtcttttgcacctaaatctagacacctagacactatccttgctatttaacatagaataatataccagcaagctaccatatagtctatcaagctccaagccaagcctaaagcccataatctatacaatcggtgtcccggcacaacgcgtatactgcagatgacggcatgccgcctgagccacatcgccaaacccgagttttcttcctttcacttctcaaccaccccaactacctttcttcgcccgaccccttttgctggcattgacttgtctagcagtcttctattccgccgacttgctggtttcacttgcccagaaaccccacgaattcccaatccgagaaatacccccgaaaagcccgtttcgcttcgcctttgttcgactcccgttatttcaccgggaccgttgttcgctgcgagactattttggtcctataagttcgctttgtgattcgtgtttcttctttgaagattccattttactttgtgttcccgaaaagcattcgatttctcttcttttggtggattcattctagacccgcgagtcgaaatcaagatggctgctcctacgcaacttgcttgtacgtgttttccttccatcttctatgtccctgacttcaggtcgcatttggctatgcgggtggatgaatggttgctgataaccacacagtccgcacgctcaagggcattagcatcatggatgccgcccctgtctaccagcccctttctgggttcgcgaagtaagcattgagccagataacaaacaagggatgtcgctgactcgtttcccagaccggagggtaacctccgctgtagcggctactcgccgtgtggtcggtacttcgcatgggcatcacccgagaagtaagttgacttgccccccaactccacgtccaaattctaacattcgtctccaacatagggtcaccattatcgatccctccgtgggccaagtcgttggaaccatccccgccgagaacgtgttcgagcttggattctcgccactcggcacctatgtgatcacctggcagcgcacatccaaggacgagaacggagatgccgtcaagaacttgaaggtgtggcgtgccattgaggatggggacgatcacacgattgtgggaagtttcgtccagaagtcgcagaccggttggaacttgcagtacactgccgatgagcggctgtgcgcccgtaccgtgaccaacgaggttcagttctaccagagcgacaacctgtccactgtttggaacaaattgcgcgtggagggagtcgcggattttgcgttatcgcctggtcagagtcagtccattgccgtgttcattcctgagcgcaagggccagcccgcccaggttaaggtgttcattgtcccgcagttcacttcgcccgtgtcgcagaagagtttcttcaagggcgataaagtccaactgaagtggaatgcttcgggaactactttgatcgtgcttgcgcagactgaggtggaccgcactggcaagagttactacggcgagacaaccctgtacttgctaagcgctagcggtgcattcgactcgcgcattgatcttggtatgtcttctcactatactacatgttgaactaactgacactccacagataaggagggtcctattcacgatgttagctggaaccccaactcgaaggaattcggtgttgtgtacggctacatgcccacgaagacgaccatcttcaactttcgcggtgtgcccaaacacaactttccccttgcgccgcgcaacaccatccagttctcgccgcatggccgcttcgtgctagttgccggtttcggtaacctggcaggacagatggacatctacgatatggacaagaactaccacaagatcaccaccgtcgaggcctccaacgccagcgtgtgcgcctggtcgcccgatggacagtatattctgaccgcgacgaccagcccccgtctgcgtgtcgacaacggcgtgcgcatctggcacgttaccggcggtctcgtctacaacgaggagatgaccgagctctacgacgtcagctggcgcccgcagagcatcgagcagcacccgctaggcgagccgctcaccaaggtgcctgcgccccacccctccgctctcgcgtatatgggcacgcgcaaggctcccgtcaagcccgcaggtgcctaccgtccccccggtgcccgtggccagctgaccccgctcgcattcaagcgtgaagacgaaggcggtgccgcctttgtccgcgatggcgttcccggcgccagcatgaacactttcggcaagccccgtcgccgtgagatccccggtgccgagccctcggaggagtatctgcctcccggagccgcacccggcggcggcgtcgccctgcctgccgagaacctgtccaagtcggccgcgaaaaacaagaagaagcgtgaggcggccaagaaggctaaggaagaaggaaccgaggttcccgcgaacgccccgactgcgcccagctcagaacgcagtcgtaaccgcggcaagaatggcactaccaatggaaacggtccggccaagtccacgcctactcctcctcccgctgctcctgctcctgctcccacccctgctccccctgctcccgtgtctgttgaggattcctctgctcaagataagaaggtccgtggcctactgaagaagattcgcgctattgatgagcttaaaatgcgtcttgcaggtggcgagaagctggaggacacgcagatgaagaagatccaaaccgaggatgcggtgaggaaagagctccaggccgttgggtatgatggttgattggaattgaacagagaatgcgtgatgcttgatgctcgacgcttgacgacgttatgcagattgcacccttgcatggatatacctatcgacccgcgtgtattgcatttggtataggagctgttcaggttgatatcgatatccgtatcaatatcaacaccactcactatcaatataaacttgaaatggctcatagaatatctgtaacagtagcctacaaatctaaatttacatctatctagaatatcacacatccaaaacagtcgatctgaatctagtcgaccagaaaagaagtagaaaagaggtgatatggcggcacaaaggctctcgattgtctgcgatgaacttccaggaaatttatatttcagaagaaagaattagaaatacacatagcattgaagacctgtctctcttcctaatgcgaataaaattatatctgattctctccctcaagatctccgacctgaacaccccaaacttgccacttagcttcttcaacaaagtccctccgcaaccacagcccagacggctgaccctgcgtcgaagaaagcagccctctactcgaaagatggtcgcgttcatcgccgggctgagtacgatccagccaatcaaatagcaaacgaagctgccagatccgatcacgaatttggtccggatcagcgccgcgaccgcgtgcagattgcacgatgttgcgcacggtgtgggacagagcgagtctcgcatctacagctgaggtacgcagccaaggtgggacggagacaagatcggtggtgatgcgcacggagcgcatcgggaaggaagatgggaggacgagggagcgctcgcgtatatcgaggtcttgtagggatgggaggtggaagacccagtcccagggggtttgggacggagttatcaatgtagatgccttaccggtgagtagggccatgcgggttggccatgctgagggtggcaggcccttggctgggtttgagaggggaccagccgttgctgggaggatgtcttgggcttcgctgagcccggtcagggtggaggcgaatacggaggttgaggagcttggactgtaggttgccttgcggcgaagatagatggatgggtcgccgcggaggaatttctcgcgcagggcatcattctggctgaaatctagaacgagcggccagtggtctggtccgcgaatctcgatacgggcgatgctgctaagatctggcagtagacagggagcgctgacggtgcgggttgtctcgtcgtgagaagtgatggtaatggggatcgaaattgggcggcgggaatcaagatcacgagggatgaggcatcgtggttcagcggcgagaacccaaagatggcggaaggcttggagatggcatttgttatcaaggacagtcgttgggaagatagggtagaatgcgcatataagcgcggtcacagcccggttggatgtgccaagtgtatagctacctcctccaaggaagagcactccgatagccatgtgtgccgccatgtgactgccatatggtgtatcagcgtcgattcgaccatggagcgagcgcaggcgccggaacagagctagatcacccgtgccggccatgactgccgcagcagatagggctaccaagtcttgacaattccgaaccgaattgcgggcgagtctagcatcgtagcttcgcacaggcagccgtgagatgcggataagctggtctagataaaacaacaaaagatctcgggcctgtgcttgtcccgatccagcatggcggagaccgaccgcaaagcagaggcctgcaataatgttgaagaatggcatatcttcgctgcgcagccggcgcacctcgctgagttgggatcgtccccggtagacttcgggcagactctggctgatccactcagcagtgggcttgatactatcccacatgatcaagtgtcgtgccagtgttcgtaacaggaagatatctggcctcacgtagtcgaagcgaacagtggtatcaggaatgtcaatcttcttcgctagtaccgagtcattcgtcttcatgaagataatcatgagagcaatggtcgcgccagccgtggcgcggtcgagtacatgagcgatttcgacggtcttggtacccacggctattgacaatagccgttcaacaatgtgcatatcgcgcatgccccgcaagtcatcgcctttgccaaggttaatgaaaccgagggcaaagcctgcggccagacgatatccttcgtcgcggagttcttctccggtagcagcagcttgctcgtcctgctcactgttctcgatttccgagagcatgacctcgctcatacgacgatgctgggagccacagtaaagtaaaccgatacccataattccagcagtctgagtcaacggtgacaggttcagctcagctgctccaaatggaagcattcttgtaacatgtaccgaaagcaagcgtgtgattagagtatccattgtgcccaagtatgacgcagagagaccgagcaggagaccaattgatgtcatggtatgctttggagtgaggtacttgaaagctacccacttagccaacgatttaagatggccattcagacccagagccaacaagaacccggcatgacggttggtaagatcctgtggcttgttgaacaatatccacgacgtatcaatacccttcgacgccttggagattgccagaccggttgagactccgttgtggaagaaggcccagcagaccttttcttccgagaacgcagatttatctgcgctgacagtcacattgtctggcttcatgacacactgcagggaaaatgaagggatgggcagtttctcagtcaacaaaggcaatcggccactaaaagtgagcattgcacgacccgctggagtagacaacgtccggactgtcacgagctgcacgatttctttctgcgcctctaacaagtccgaatcactccagccaggttcggctatgcactctgccaccggtgctttggactggtttagtagtttacctgcttccacaaatcgcttatcctctcggaatatcagcctggtgaccgagtatcggtcagcctctgcagaagcctcaaacgcattggtggcatcaatatccaatgctgagctgctgatataatggaaatcccggacggcattatgattgggctgctgcggcgctgccaatgaactgggttgggccgggttcatcgacatgtaaaggtcttctctgtcaatcatttctaggagcgtggcgttccaggacgtggaggcttcaatctggcattgcatgacggcttcatagagcggggcactgacgccttctgggaagctatcaatgacactctttgtgaagccccaacgctgcaaaagcttgattttttccaagggcgtcgatacactgtgaacctcggtgaagaatccattcaacgcacacgtccttggtgtgataccgaaacattcacgccacattcgccctttcctgggagttcgctcggctgcattcacaatatcaaggagagaaacaaatggtgtggggctccgatgagcagcagctcccatgagaaattcgaagatggacggaggcggaaagggttcggcgggaaccttcagcccagcgatatgtgtattatcctcaaactgccagcgctccatactggccatttcggtgccataatatgcatcctcggcccatgtccatgattcccatcctagccagctgcccagttgtgcgataacgggagcaagcaaacctagaggtctttgggattcctccgagtcgcaggtggagagcttctgttcttctcgcaatagatgcaaggctacaagaacactgcacaatgcggtacatcttgtgttttccgagaatgcttcagagatagggagatagccgtctcggccagcagccctgaggccttcgggactctggaggaattcgcggctgagggcgatgcaccggatcaagtacgaattctggcgatatgtagaccgacttgcattgacacccttgggtgcgtctcctgacgcgagactctcaattgcatcttgttcaacgatccatccccaggaaccgtccatcatccacggagctacgacgccggatgagccagactccaggtccagcatggactcccagctttccagatccaggtgtcctccactacttgatctaagtagaccctttttgcgacgcgttcgtttgggagtctgcgtttgtggaggggtgacgaatggggctgctagactcaacaagacgactgtcatggcggtccattcaatgttgtcttcctctttgcctcgaagccatttcatgacctcccaccatgcgaccgtgatgccatcgcccgctttctcagactcacgcaaggcaaacatgcagattttgagtattttcttcaccagttcattgcgaggctccattcgaatttggagtctgtggcgctttttatcagtgtctaccaggtcgactttcccgcgggagcacccatgatcaaacttgttgaagacgaggctgggatctgccatgactcggtggacgccactttctcttgggcgactctcgagtttgttggcagagatgccatccggttcatacagctgcagtggaataggaacctcaactttgacgggactaccccacagggtttgcaatgatagctcgcgttgtccactttctgtttcgcttagtgagagtattcgcgaaagatccccatcagagattctacaagcatccaaaacgtttgacacattttggatcctaaccgcacgcacgagtaatgaggtcttggactttttcttccggttcttgggggctggctgtcggtcggccctcagattcacaatagttaatttccgtgcctcctggtccacgatgtatacagctaggaaagttgtgttgcctttgtgggcgcttccaaactcggtggatgccaatgtagagatcttcaaccggcgagatgctggctctttttggaagctgcccgagaattgggacgagaaactttcaaccttggtcaatataagttcttccgggagtccggacgtcgattcacgtagggcaatgttatcaaacccggaagatagactgtcattgttaagctcttcgagtagcttgtccactggagtatccagaaagctgcctgcagtgctgtaaacagaccctgtgcctggaggtagagagcctcgaggattgaaaccaaagcttccacgcatgcttgctccgagagattgcctgaacccagcaccatgaggcatgttgctggactgactgccagtagccaggtccgaaaaagtgatacggtcctggctagttgcaaggtctgttcgggcgagcagtgagctgactcgcctcgatgttttgaggggaacaccgacatctccgaagtcttgggctactctcgaagccaagtcgtcttcggcatcatttctcccttcagataactgagtggaaggccagttgtcagttcgaggcccgaagctctctcggcctgctccagaacgagcggctggtgttgtcgcgccagtcgccatcccgaaatgtgagcttcgccttactgaccgggtacctcctgtttcccgtctggttttatctttcatcgagccgcctgattcatcatctttgtagtgcgcagtccagactgtataaatacctgtagttgtgttgatggtaacgactaggatcaaaggaccactatttggtctgttgatgcccgagagttcgtcttttggagagatatacacaatctcatccacagggtccagcacctctagtccagacggcctttttctggtgctagtgatgctgctctgaagccagcgggaagtttgcgacgtcacaactaagcccatctcggaatgaggattaatgagagagaaaactcggggtaggtcggtgcttgaggcggtatttggcacccaggaaggacctggagcagacgaggatttcgtcgatggacgcttgtttttgctgagagaaaatgactgagaggcaccgggatcaaatagcgaagacacgaaggaattaggcggcgcagtcggttgttgactgctactattttcattctggacctttctttggaaaataagaccccgaggcgtagcgaagacggagtcaacctcaaatgggaggggaattgtatgactattgcccgccacgaagaagatatgagcttgcgatttgagaactaccaccaacgctctagaaagagcctcgttagagtgctggggagctacaaccgccactcgtgcatctccatgtagatccaatgttgagaaggtttcagtccgcttttgtttctgcgtgccagtagttgcttcaggtcgacttggaggcgtgggtttggcgcgtttcgtgtcttcagcggcaaaacgagtgaatagagcatgtcgaatctcttctttctcggggtccattcgaaatactcgcttcaccatccctgcgcgggaccatacaacacagtgtttcgtccatactaactcatcgtccaccgggccagtcaatccgctttcgtccacgcatagcgtccagttgtaatggtcttctgaaggttcctgagggagaattccctctgcgactaagtaggagatggccgagggttcgtggacgcccaaagagcgaactgacgccatggtgggctggttaacagccgtagcgatcgtggtgcgccgtcacaaacagttctgcagtcaaactcgttgaaatcatttccatcgctcatataagtcatgcaagttcaattaacggtgcgctaagaacgcatgccaagtggttgaatggcgaagttggaagacgcgctggaacgcggattggatcaagttgtcttcgctttccccgaccaaaacaacttcctttttccatctacccaaccctccactctccctacctctaacatccttctctcaatctgcttttgcataggaacagacgttcagttatcagatcttactttgactacaagtcttcgactgtctatcatccctgcagtgcactgttgcgcctgtgctcgaagctacctgtagctcgacagcatcgccaactagcataatgccctcatttcccactacgcccttggtgcggcctagggaagatggcttgcagatcaggtatgagtgatgcgcttaggtcatgatacttgggttgacgctaatctcgttaatgcaaaatctttagctatccgctctcccatcgcattcacacagcaaaaggctacccacttcgagctccgaatggctcctcgatcatcatttacggttatgatactggattaaaaattgtctggagaggagggagacggtttgcagaaccaaagctgactcggcctcaagcgaagcccaagccagcaggaagtaatgcggattccgattcagtcatgattattgactccgatgacgaggaccctcaaccagtacaagaagagcctgtggttgaattcagtctagaggaaagcgaggttgaccctgctgctccgtacgaagagattctgcgacaaattgatattccccttggaagccaggtgctagaactggcggtgccccgtgttctccccgaggaagctcgctcgcctttagaccccttcccacctatactgagaaacacaattgttgtgtcggtagtttgttcagacctgtcaacaaaagttgtgactctaccacttgtgcctcctcaccctacgcagacggattcaaaaagctggcgtatccaaaccctttcgatcaatggggccaccactcatcaagatattccacgtggtgtatctatcacattcacctgtcatgaatttgaggatgagcaagaccagcgaaagtcgcggggccgatttggaaattttggtaaatgggatctgcttgtggccacgcattctgcagaggggtgcggcgtgctgttgctgcaccggattccgatccgcgaggaatcttctttgcgtctcgtggaagaggacattatctctcaacggcgcctcttgccggcacctgcacagacgattgccttcaacccatccacatggccatccgcccgccatgccaacctgcttgtcgcattctacagcggatgtgtgaagatttattcctgctttgttaaaaaggcctcgagatctttgcgacgggcttcgatgccagtagaagaatatgaaactatcgacacggaaggtcgctggttgatcagtttgtaccccggttttgagcaagggcccggcggacttccccggcggaagagaatcattgatgccgactgggtgctcggcggccgagcagttatggtgcttctcgaagacggcgaatggggcgtatgggatatcgaaggtgccggtcctggggctgtcaagggcccgctgcaacgtcagacgagtgtccaaggtgtgactggcggttccttgacagcatacgctgtctgcggtcgtattatgacaccactttccaacaccaactccgaaacagagcatcgaccccggttcgcgcctatgacaccatccacaaggcgtgtacgtgaagatggattgctgaagggatcgatgagcacagccagtccgtctcaccgtggccaaatctctgtcttgcagacaaatccatcctcggacgtattgcctgacgagtcgatcctgctccgtcacggccgccagagcgcggtcatcacgagcttactgtctctgtggcgcaacgctgtcaaaaccgccggcacttttgattcctcgaaccgatgccgcgtttctcctttccaggacgtgaatttgatgggccagaacttccaagcaattggacacatacctgcaccggcacgccgatcccggcaagcgctgcggcaagtctgggatgtactcgtggcagcagagcatcagattatgattctcgccccgaagttgacagaatccatcgaggaaagcctgcccgtagtgaaacaggaagaaacagaagagaccgaccagctgatgctccaacgaggcgaactggatgtggaaggaatgggccgcctactgaatggtatggccggcggaaacgcgtctatgcgtatgggcagccctgtaaagcggactcgcgtgttcgcctgatctcagtcatagtctactaatacccatactccaagtttcttgcttctgttatgctcacgttctactcattcataggatactattcgcgctgtaaggtggagcgcaaggcgagatccatgccttgaaattccttcctcggaagtgaataagctctgtatcggatgcgatatatcaatgaccattgcaaaaagtgctatgcacgagccctgacattgcaattgaatgttgcagtgcaacattccgttacaattctcgtatttggctttgggttcgcatcttcgtctctgttctactgcggatatcgatctgtctctcgacgaatcttacatcgatggccgcggggggcagaggaggggatggccaaagttggatgcgagtgaatatgggtatgatgggacatttcaattagaaagcgtagatgtgtacctgttacaactgaatattatcatggcttttttgtactatgcataagcatatatatcatgttagtttcctcaaccgaacaaaatataacaagatcatctatagagatcgatgttggttttccttcaacaatccacgatcaccaccccctcccttttgccacaaccatataccctcaaccgcccatgccgcagcactagcatgacgaccaacaccggatgcaagaggcaagttactaccctcggcatcttttgcattcttgctcttatctctaccctgggtctgaccagcagcgccatcggcctcggcaagcataccagcaacaatgccttccttttcaataacgaaccagagtccatcggacagctgcccaccccgctctccaaactctgctcgaccgagacggaataagatccggccaatgacctgccacgcgatgcatcgttgcgcggggaacgtcgagcgtgccagaattgccagctcggggatcgtgtagcccgcggcatgcggatcctcgccgtgatggtgcaggcccatggttgtcgggagggagagggatgtttcgggggcaaggatggttcctcttagtgagaagcggattgccgagggcgccattgagatggcgttgctggctgggtggtaggctgacgtggaatctgggtcttcttcgtcggcagagagaggctgcatccaggagagcgttgatggatcctgtgctatctcggggaagtagtgtgactggagatctgtcaggaaagacggtgaagatgggtctaggactggcatcggcgcttttggctgggggaagtggaaggtttcaagagtagcggggtcaagggaaggccgttcagaggccgggcggaggtcttgtgggaggtttggtggagcgagatcttcattacgggggtgcggcttaggtgatggtttgggtagagaatgttgtgcgcttggagcagaaacaggtgcagacgaaggagtgtcgaaggagactgatttttttggtttaggtttttcgtcggccacaggtgccggcggttcaaatccagtcttttcatcttcttcaatatttgctctgcggaggaatcgtgcaagaagtcctgggtccatctgttccatcagctcctctcgctcctgttgaatctgcgcgtctgacattgccgccagctgacggcggttctcctcatcgatggatttcttgtcatcttggacggtcggttgagtaggtacaggagtcggaggagtggactggtttgctcgtcgctgcttgaaggaagagggcttgcgcgggcgaggggcagggaatccagtcgatgacgacaaggtcggcaatttaggcgcggggggaatggcggtggggggagcccgttcttggatctccccgatcagagagaagggagagggaatttctggagcaccagattcaccatccaggtcgagaaggaagcgttcacctcggaaagccatgatgcgtaaatactggtgaagaggagaaaaaaaaggttatgtcagcgcggggagatccaagatgcggctcccaaagctaaaatggggctgcagaagaggctaaccggaatgggctagtggaagatggcggatgtgctagtcccaattggattcctcacattggtccgtggcatctacaatgttgtatacggcctgcgttgatttttctatgctatgaaagaccgatggaagactggttaggatcattcatctcgatggaaatagaaagaaggatgttggaggggtttttcctcagctaaacggttcttatgcacgtcgacgtcgatattgtcgtacctatcatgaacttccacagggaatacacaggcaggatcaatattacatagactctattgtctataagatggaagaaatagtcagtcgaaaccagatataatcccaaaatatagcgaacatctgatttgaatcacatgaggccattcggtaaatgaggccattccggtatcaggtactgcgcacaatttacggttctaagctcaacgatccgcaagggaataatggatatggtctccaatgctccgtgacttcaggaaacaagaattctacacaagatagagggtaagtatagcgccatgctccctctctatataccgttctatagcaatttccccatatctccgacgtactatagagctggacatatcaaattgctagtactttgccaaatgtaatgtgctgtttgatccataacctgcttgctctcgtcccctttcttccctttttccctctttttttcccgtcgtcttctccctttctatttctgctttcgctctctttttcctctcgacattttccccttccccccttccgctcctctcgcttttttttttctgcttttcccgcgcttcctggctgttttctctctgcctcaccatcttatctttctggtgttcctcttcccccccaaatctctgtttgccgacctgataccgacacgtttcaccactttgcgtcaactcaacgccttcatcccgattttgactaattccatcactttgtcaattttcggtctgttaattggcattggcattgtgctaaattatgtcggaccctgctaagatggggatacaaaaagaagaagggcccgttgacgatgtcaaatccggagcaggcgcccgacgtgcctccggtaccgccaggcggtcgcgtcgtaagaaggacgacgaccccgacaaggacaaggacaagaccaaaaaggacaaggaaccgaaggaaacaaaagagaaaccggtccgagctcctcgccggccacgggagaaatccaacaccactgcttcccggaaaaagcccaagctggaacccgcggaagaaagggctgctccagacgctcgcagccctccacatacccctgcaacgcctcaacctgcacagcccgctcagccaactcagccaactcagccaactcagccaactcagccaactcagccaactcagccaactcaaccaacgcaacctacgcaacctcaaatagctccaccgcctcaacctcctcaacctcctcaatctgctccgtcttcatactcaaatacaccatcccatacagccccaggagcttcgtatcagctgtcgcaaccctcccgcccacaatcgcaacctccagtaccgcaaccgccacctcaacgaaccagcgggcaaaacttcgaccccattcgctctgcgttcgacaatccatcgccagcgccatcatacagtccttctactcgcgcaatctctcctcgcaatgcttatcgtgccagtgcatcgccggcgatctcaagcattatcgacccaccagcccagaactctcaaccaatttacaacacccttcaacgctcctcttctggccatgtatccggcctctcttcgccagcactgtctgcgatggtttccacctctccacatccgtccttagcaccccccgtttcctccgctgcccgtggagccatgcacatcccgcaggccatgtcgcagtctaccccctacaccaccccatacccacctaccgagcagcggccaacgccatcacaacctcctaaacccgaaccgtctccgccggtgcaacctcagcctcccgcgcaacccgaacccgctgtgcagtcgactccgcccagacaacaaccaaccgattcaatggaaatcgatcccacagagcagcttgaacctagcgctaaaaaggaaaagagtacagctactgcaccgacatcaaaggcctcatctcccaagccagcgcgatctgccaaagatgctcctcaactgccccaaggatctggcatgatcacaaacgcgctgttcggcggaggagaggaacctgcaaagtcgcccgactcacgaagcgcacccagcatcatcgttcatgttccgctacaaaagggcaaccagattgtgaactttgcacggcttgcagaagagcaatatggcttcgctgccttgcaccctcgtctggccgctcacaaagcccgcatggctcgagtggcagctgctgcggccgcgttagaacgaaatgataagactgccaaagggatatctgccggcgagagtgccgatgaggatctgagcctcgatgcagaacgcgatagtgatatggatggcgatgttcccatgggtggcactggcacaggaaccaacggtgcgccctcggagactagcgatggaaagaagaagcgacgcaagaaggtcgaggaatatgaccgtgatgatccatttgtggatgacaccgaaatggtgtggcaggagcaggctgctgctagcaaggacgggttctttgtctacagtgggccactagtcccggagggagaaaaggtccaagtggaacggtatgtctactcattgtccccttactgcacatttactaattatctgcagcgccgatggtacaatcaaacgtggccgtggccgtgggcgaggaacaggtcggactcggaccgtgacctcgcacccacacgttcctattgcagctgccgtgcccgtctcccaagatactggcctgccattacgtggacctggctctcgaggtggcacctcacgccgaccgcggggcaataagagagccgatggtggcagcgaccgcgctgctaccgcagccttcgctgcatccgcttcccacgaaagccgtggtggccgtggtggcggcactgggagctctggtcgtggtggaactaacagcactcgaggtggaaagtcatccatatcaatcccgatgccagaccttgctcctgcgccgtcgggtgttgcccatggaccccctgctcccagttcgctatctagcccagagctcatgatgaaatagagaacatgttgactgatttttcgtggcgtttgtttggtggtcggagcttgatgactttgtttagttttatttgcgctatcattttgctcatgggtttgatttgcccacctattacattgttttttgttgtcggactcgagaaacgttgcttcgtgaacacatggactctctacgtacacctcggttatgttattatggctgaatatcttaattttcagccaagatgcttccaatggaacacgcttagactaagtcatccttaggcgcctcggatattgagtttgttttaccattgtcgattctttgtatgaaacaaaggtggtgtttcatgttttatggtatgaaacaatatgcaaagtctaaagtactctatgaaacaaacctagaccggtgtctatatagatatgcttccaaaagaaccgtattactagtagcaatattttatatcaaatggaattaccgacctgttctatatttatccatcctctaaagacatgagtgcaaaatctagaataagtggtttattggaaatatttatcgggcgcatatccatagaaagagtatgaaattgcacttatgtacaccgtgtaatgcaggaagacatcccagcagccaaagatagaatcggaaatgaacaaaatagggttcgttgccagatgtttctaagcagagtcattgaatgagaagtaagaagaagaaaatagaaaaagagagagaagagagacagagatacccatagatcaatggaagaaaaaagaaagtcctgttagggcagcttgactcgggctctctttttttttgttctatcaagagcgccgtgataacacaccagacagaacaacacagccgacaaggaaataacagatatccacgatcatcaaagccgaaatcgtatcacatcgacttttcaggtgtatgtgcacgttacctggacatagacatgacaatggaaggaaatagaaccaagacatccaaatacattaactagtcatcaccaaattaccgggccgtacttcctggttgggtgcgccagtttccgcctgatggaacaggcaatgggggaggcgggccgttcggaggcgcagtgcgaataggcattgccgtggagtgcaggttcgtacggggattggagttgttggagctggcggagcgagggctcatgaatgggcgagatggggcatcgatggcagagacaggctcgttgagctgctgacgcatcgcgcgacgaccgtatcggctgtcctcgtcgtttgcttccagcgagaggtgctccagagaggggggtggtggagaccgtgtggttcgggacgaagacgatgagtaatattgaggctgaggctgggactggggatagtgacggtagctggatgggaactcgttggcgatctttagagggatttcgcctgatgctgggtttgacgggaatggtgactgctgtggggttcgtgtttgcttgttgacgagagggggtttcccgatagtgcctgatatgggagctgcggcgggagacgattttggggttggcttcgaggcctctctagagagttgggttgatattggtggtcccaaataggacttgcgcttttcttggtccatcatgctcattgcccatccttcgaggttgactggtgtgcgcttcgcggcctgcaagaaggcatctttgtcctgaaaggagttagtacatgtgaaaacaagctacaggtcaaaaagagagatgaacatacataaagctctcgtggggttgggcgctcttcggatttcttcaagagacacttcccaacaaagtcatgtaggataggcgggaaggcatcgctcttgggcagcttgggcgctgtctcgtgcacgatttgctggagtagatccaaaattcccatgggccctgtactggcacggtttccggcaccagagtcggagtgatcgaaggggaactttccaacagccagctccatgaccgtcaagcccacgctccacacgtcggaacggaccgtataggcgcctccctgaattcgttcgggagccatatatgtggaagtgccaacgaatgtatcggcaatcgagttaactgtctcagtagcaacaccaaagtcacagagcttgatgttgccgcgggaattgagtaagatattggacggcttgatatcacgatgcatgatgcggtgggtttcgtataagtagacaaggccagccaagacggactcggtgatctttcccagcacatcgactcgaacagggccgaaatctttagaaacgcggtcgagagatctgatggcccgtcagctatatcctctttgtttctcatatcggtccacctacccgaggtccatatattccatgcatagcacaatatctctcgcttcgttttggaatgcaccatagaaagtgacaatattgggacaattgcagtcatgtccgactcgaagttctcgtagaatctgtttccgcacattctctttggcttccacacggataatctgcgggcataaggaagattagagctgaccaacaagcaagaacacaccatagacaatacacacctttcgagccatcactaccttggtagatgcgtgcatcaccttggagacagtacctccattcccggcgccgagttccttcaatgtgaccaggtcttcactgcgaagatcgaggcgaaactccagaccgatttcgagcgtatctgtgttgctaagttcgctattaccagcagacccagtctgtccatcgccatcggcaggtttaggggctgcattgagagcaagacctttgacattctttcgtttcaacgtccgagccttgaactggtccgtcatggcgcctggaggggttggagttgcacaaggggaaagttgtgaaagaaataaaacgaacagcccagcgcctgagtgatatcaagtccgggttacccaagccgatgggatcagagtggtcaaaacgaacccccgagctagcagcggggaagtcgatatcaccttgcgatgttcttggcgacgctgattggacctttcgggcgcgtcgcttcgaccaactatgaccaaaatgtgccggtcggcggcaaacagatattgggcttttcttacaggtatgaagggagaaactgggagatgatcttcaagaactatgaaagccactgcaatcaatgaaacaacaaatgtttcgggggttccaccggccttttgggctagcttgggtacttgtgactttacacaacggggtttacggctaaaatgaagtggataacactgttcaaactcgggcacgttcaatagtctcggccctacatcaatagtgtaaagcgatatgcataatgaggatccgaccagggcatggttgaatgtacacaaagacatcagcacgtgacacgaatggcttaagccacaatgaggctacctcaataggactagcgtctagccacaccagcactatccaatcaccgctacccgcgtcctctcctcgccgatggccgtgattcttcctcttgacaactattgcttcaattccacctctttgtctcacttttgaccgagctaacgagctgggcactacctggtgtcgcatctgcgccattctatcttgaatctttcatccgaaatcgcattcttttcggtccctagcaatagggatctccacttcaagatgagccttcgcgacctaatcgagggtgaggcagttatggatgacgacgatgaggaagttgccgacgactatgatgctgagggccgccagggcgcaggtgccgccaatcactacaatgactcgagcgaggaggaagacgaagaagaagatgacgaggaggctgctcgcgccgtcagttttcgcctttcaccgggttgtatctctttgctgacgaactattaggtccgtgaaggtttcattgttgatgaagacgaagaagacgagcgtgccgcccgcaaacaccggaaacgtccacgcgctgctcgcgaagaagagcaccttgatgaagaagatctggaactcattggacatggcccaagtcagcatcgtggaccagctactgatgtatgtaagccgcagctcattacttgacaagattctgatgctctgattttagtcaaagtttaagcgcctgaagcgaggcaaagatcgcgaaagctaccaacagtctcacggcgttgacgatattttcaactcggacgaagaggaggaagcgcaacaatatgctagaccaggccagcgtcgtggtctgcgcgatgaaatggacgactttattgaagaagataccttctctgacgatgaggctcagcgtgaacgggatgaccttggggttgcgcctgcctccagagtcaacaagaccggcttgattccgactgacacctcgggcttggatgaaaatgcacttgaggatatgcgcgctgcatttggtgatggcacagagtacgatttcgcactgcaaatggaagaccaagaggacgccgacaaacaaaccgaagaacgccacctagatttgaaggacgtctttgaaccatccgagctggctgaaagaatgttgacggaggacgataacgaaattcgtctcctcgatgaacccgaacgccatcaggttgctcgcaagccctataaacatgtgacattgaccgaggatcaattccgggaggaggcagtctggatttcgaacttgatgctactaaagaagcgcatggatcccgaactgcgcgaaccattccagcgctccgttgctaagatgttagaattcctgatcacggacgattgggaggtacccttcatttttcagcatcgcaaagactacatgattcatgctgtcaaagatatggccaatggcgccgatcccgacgacgagtccgccaaatacagcatccgggccgagaaactcctcaatatgacagatttatgggatatcttcgaccatgatctcaaattccgggctttgatcgacaagcgtggtacaattaaaaagacatacgacaatctgcaaagcctcttcaatgtgaatgattccaacgtcgaggatcaacttattgcggccacgagcatggaggagcttcaagatgtgcaggactatatccatttccagtactcctcacagctacgtgatctcaaccaggtcaatggcgatgctactggagaaacacaacgccgaaaagccaccggaagatctttctttgagcgtgttcggaacggcaaggcctatggcttcgtgcgtgcttttggtatcactgcagatgcgtttgctcagaacgcctccaaggaaggtcgccggcaatacaccgaagatcccaccgagcagcctgaagatttggcagatcagtttgtcgacaatgacttttctaacagttcgcatgtcctcaaagctgctaagtcaatgttcgccgaagagcttgctgtcagccctaaaatgcgcaaggtgatccgtcaggcatactacatgaatggagtcgtggattgcttccgcacagagaaaggacttcgccggatcgatgagcagcatccgtatgctgaattcaaatacctgcggaaccagcagctaagcgatattgcccgtcgcccggagatgttcttgcgcatgctcaaggccgaggaagaaggactcgttgatgtccgggtgaggtttgagaactttgaccagttccgcaaacgtctctacgccgatatcgagtcagacaactacagtgagcttgctgatgcttggaaccgtgttcgccgtgaggtgctggatttggctttgggcaaactggagaagttgatcaatcgcagtgtgaaggaaaatattcgacaggaatgtgagaaccatgtggccaaggagtgccgcgaagcgttctcacaacgtctcgaccaggccccttacaaacccaagggcatggttctgggcacagtgccccgtgttctcactctctccaccggatctggtcagctgggccgggaccccattcactgggcttacacagaagaagatggccgtgtcttggagaatggcaaattctttgatctttcggtaggagatgagagccgtgacattgcagatggtgagaacctagccgcatttttggatctgatggatcgtcgtcgaccagatgtcattggtgtttcaggcatgacgccagagacgcgccgcctgtacaagcttctatccgaaatagtcgaacaaaaagacatacgtggtgcatcctacacaaatgagcacgatgaggagatcagcgacccattagaggtggtcattgtcaatgatgaggttgcccggttgtaccacaacagccctcgcgccagaagcgacaatccaggctttggacctctaacccattactgtgtggctctaggccggtacttgcagagcccgctcaaggaatatgcatccttaggccgtgacgttgtctccatccagttcaaaccaggccagcaactagtctcccaggacctgcttctcaagcagctggaaaccgcactggtggacatggtcaacttagtcggcgttgacctcaacgaggcagtggcggacacggcgacagccaatctcttgccgtatgtctgcggtcttggtccccgaaaggcggctcacttgctcaagattgtcaatatgaacggcggagtcgttaacaaccgggtagaattgcttggtgtcaacgcaacatacccggctatgggtgtcaaggtttggaacaactgtgctagtttcgtctatattgacttcgagaatgctgatcccgatgctgatccgctggataacacccgtgtgcatcccgaagactacgatattgcgcgcaagatggccgccgacgcacttgagctggacgaggaagatatcaaggccgaaactgacgagaacggcactggtgccatcatgcggaagctgttccgggaagaggcacaggaccgtgtcaacgatcttattttggaggagtacgcagagcagcttgagaaaaacctcaaccagcgcaagcgtgccacactcgagacgatccgagccgagttacaacaaccctacgaggaattgcgcaagcactatgtcttcctcagcaccgatgatattttcacaatgctcactggcgagacgcccgactctttaacacctggtatggtggtgcccattgctatcaagcgggtatttgaggatcacattgaggccaaattggattgcggagttgatgtactcgtggccgagaccgaactcggcgttccctacgaaatccctgtacgcaatgtataccaagtccaccaaactgtcccggccaagattctgttcttgaaccgcaagggtttctcttgcaacgtctctctacgtgaggatcaggtcagccatccatctcgtcggaaccaggatcatggcttcggcgattgggacgaacagcaagagaaagccgacaaggagtcgctgcaagaaaagacgcagcgtggcggccaagccatgcgtgtcatcaagcacccgcttttccggccgttcaactctacccaggccgaggagttcctaggttctcaaagcccaggcgacgttgttattcgcccgtcctcccgaggtcccgatcacttagctgtcacctggaaggtggcgcaaggtgtgtaccagcacatcgatgttctcgagctggacaaagagaacgagttctctgtcggccgtgtcctcaaggtcggtggtcggtatacttatagtgacctggacgacctgatcgtcaatcacgtcaaagcgatggccaagaaggtgggcgagatggtattccacgagaaattccaagaaggcagcaaggccgagacaggtatgtttttgataatttatcccatctaactagcatccgactaacatctaatagatcaatggctcgatacttataccaaggccaaccctcgccgctcggcatatgcattctgcatcaaccccaaataccccggttacttttatctttgcttcaaggcaggcgagcatgcacgacttcaaaactggccggtcaaggtgattccccagggctacgaactgcagaagaacccctacccggacatgaacgctctatgcaacggctttaagctgatgtttagcaacatgagcaagggcaaccggagatgagtgtttctcgtctgtacagtgtactatctattcccaaaaaaatccccaaatcccgaaaagatgggatggaatttcctacttcttttaatttgatacacctttggcatcgggcatgtaaacaatatcaatgaatttcaagcgattcgtggacctcgagactgtatagaccggattacgtaggctgtatacaccgtgtaccatttgaactcatcctcggtttcaacattgtttcccactttcgcccctcatatttcctcgcatttcctcatatttctttgtttaattgaagcttcagccccgaatgcttcctgtgatgtcaattgtatagtgtggcttatcccccgcatcgccacgttcagccgcaccggaccgcgacggacacattgcggttcttgcaacccctcactgcgcaattatggcggccatggaagagctggagattcacagcaaggtagggctggaacagtgacagtcaaagactcaagctcaactaatatctttagtcgtactttgtacgttggattaatgtcagcgcgaactacaccatctcctggagtatccaaccgcacaagaagtccgtcaactttggcatcttcaaacaccccggcaaatcgtctgttctgagctcccatatccctgcctccgattcccaaagcaccgattcaaccgagaacctgcccgcaacggcgacgactgccggcgcgcgtcaacaaccatctgctgttatcgagaagctgacggggattgggctcaaaccaatcaaatggacgggcaagtgtgaggcagacaagattacccaggggacctacgatgtaccgttcagcgaagggggcaactatgccctcgttttcgataacaccttctccaaacaaatctccaagaccttgacactcgtcctcctcacctatccgaccggccttcaaccacctagctccgtatctcagccaggggcgtcgaccgagtcgctgccgcagcccaagacccgtcgacgaggcaacagtcgagccacgctcaactccctgcaagttgacgcatcgaaccaaaatgtctacactggactgctgcagaagcggcgacgaaagcgtcaccagggttgggcacgccggttcttttcgctggactttacctcgtgcacgttgtcatactatcatgatcgcaactctgccgcactgcgaggcgcgatcccactctcgctagcggccgttgcgaccaacgaaaagtcccgtgagatatctattgattccggtaccgagatatggcatctgcgtgccaataacgatcatgaatttggtgaatggaagagtgccctcgagaaagcttcctccaaggaagcttctaaggacaagaacaatggcagtctagctgcccctccggagctgcggcttttcgccccatcgcagccctcaccgatggaggagagtgaatgggctcgcgttgagagccttgtcagttatatttccggatcgcgagatgcgatccgccggctagccaaggatacagatcccaagtatcttacctcgcccctctcaactcctatcgaccggcctcgttcgcgtggccggtcccctagtccccagcgcagtactcatgaggctacccccagtgagatggaggccaggcgcccgttctggaagcgcaagacaagtggacaattgaatgccaacagcaagcgaccatcggccatgtccacggactccagttcctctcagcttgtggtgcctgctaccgagggcaagggaaagcctgccagtatcaccagtcccatagacagcatggatgagattcatgaccatttgatgactgtgctgcgcgatcttgacaatgcggtcactgagttctccacgctgattaccgagagcaaagagcggcggcacccgccccagccatctatggttcctcnnnnnnnnnnnnnnnnnnnnnnnnnnnnnnnnnnnnnnnnnnnnnnnnnnnnnnnnnnnnnnnnnnnnnnnnnnnnnnnnnnnnnnnnnnnnnnnnnnnnnnnnnnnnnnnnnnnnnnnnnnnnnnnnnnnnnnnnnnnnnnnnnnnnnnnnnnnnnnnnnnnnnnnnnnnnnnnnnnnnnnnnnnnnnnnnnnnnnnnnnnnnnnnnnnnnnnnnnnnnnnnnngacgcccgcctcagccatctatggttcctcgccggagtatggagtctgacatgtcgcaagaattctttgatgcgacagctggaggtggtgacaggtctcccctcctgactatccaggacagcgacgacgaagggcctgaagaggaccggcctgcctctgctgccgaggcagtccaggatgatgccccctctgatagtgacggtgaatgccacgcggcagcaactcgccaggaaagcagcaccgcatcgggcatgttcccagtcaaacccaaatcgttggttccgttgcccctggagcctataaaacgccgggcgaacattctcgccccaacagtcctacctccaagcttgattggcttcctgcgcaagaacgtcggaaaggacctgtccacaatatcgatgccagtgtccgcaaacgagcccatatctcttctgcaacgcgccgccgaggtcatggagtactcaaatctgcttgaccaggccaccaaatccacagaccccattgagcgtctgatgtacataaccgccttcgcaatatcctccctttccagcagccgcgtccgcgagcgttccatccgaaaaccattcaacccaatgctaggcgagacctacgagctagtccgtgaagatcaaggcttccgtttcatctcagaaaaagtctcacatcggcccgtccaactagcctaccaagccgatagcaaagaatggagcatttcgcagtccccgatgcctagccagaaattctggggcaaatccgccgagatcacaaccgaaggccgcgttcgcattatcttacacagcaccggcgaccgctatagctggacgccggcaacatccttcctacgcaacatcatcgcaggcgagaaatacgtcgagcccgtcggcgagctagccgtcacatgcgaatccaccggccaccgctccatctcaacattcaaagctggcggcatgttctctggccgcagcgaggaagtctccacccgcgccgtcgacgcaaacaacaaacccgtatccctcggcttatctggctcctggccctccacgctaactctgactcgtgacggtaacccgaccgatgacattatctggaccgccggctcgctcgtcccctctgcgccaaaacactacggtctcacctcctttgcagctgcgctgaatgaaattacctcgattgaagataagcatttgcccgtcacggactcccgtctgcgtcctgatcagcgcgcgctggagaacggtgacctcgaccatgccgaggagcttaaggtacagcttgaggagggacagcgtgcgcgcaggcgcgatatggaggatgctggggagagttgggttccgcgctggtttacgcggattactgatgacactgacggggaggttgcttggcggctcaagagtgggaaagatgggtattgggaggagagggctaaggggagctggtctaatgttgtgcctgtgttcgagaatcaagagggttagactagatagttgttgatgttggtttgttctgttggttacattctattggacatgcaagaccaagaatataaaggagagatgaggcttcgcggtgttttgggcaggaccttcttcactctatatcacgataaatacggacttttctttctctggatgtatcattctcttgaacggcttactgagcgtgaggatacttgatgcgcagtgtcatttcgttgggtacaaagttaagagtatcgaatcacgaacaagaagtcaagtaaatatgaacagaaaacagaaagcaaaacatcaatgaagagaacattgaagctgagaataaatctcatgaaccgaggcttgtatgcgaaactgaaatcctccatgtgaaaaaccgtaagctgtcgtattcatcgataattgaaaaaccgaaaaacataactcctttttattcatggttccattgttagaccatcaccgatgcgagtatgcaaggtactcatttactcgtcgtcatcggattggggagcagtccagcgacgcgagttgcgcatcttggctgccttgcgtgcactttggcgatccaccgacccataattctgatttgccatgcgcatcatgacgggaaggctgttgagaacggaacggttaccctggaaatagtgttcggaaaagccgccctgcaggatgcggcgcagagcagtgagtcgtacccacttccaccagcggtcgatagtcatgactccatggcggccgatcttgacagtgagagtgctgccgtaatgacggttggtgttctggtcgatggcggtgttgtaacgaggaccgcggcctgggttctcgacagtggtgaggatcgaggcgaagttgctgtggagggacttcttgtcgcgcttgcttatctgcttgccgtggacggtggccaggttctgaagttggctctccagctcgggagtgttgtggtaagcgttgtatcttttcacgagcttgggaccggatgtggaatcgtgctcatgctcgtcgctgtcatcgtttgaatcagcgctctcctcgtcttcgtcatcctcttggggactgtagctcttctcatagagtagggcaatgttttcgcctgctgcaatttgcacgttggaatcggagctgtcgagctgatccatgaagatctggactgcttcctcgctttcttcttcaaaatcgtcgacttcggtggcgaggaacccccactgctggagcgcggcagtaacaatggtggggtcgtctgtggcatcgacggattggccatccgaggcgatgatgtccaggaggaaactcatctgttcaagaatgccatcttcaccggcacctccgaagatagtacacgccccaaggcagtgaatagctgctgccttgacaagaggggaagcagagtcacgaacggtacgggtgagcaaggactcggtgttttcgtaaacggtggtgtcgaaagctgagatgacaagcaactcgatagcgcgcaagccaagggttgcttcgcgcacactaatctcggtgcggacgcttcgctcaaatgcggccagtagttctggaacaacgccgtggatttcttctactgtgtagtggtatttggtcaggcggcagaatacttgcagggcctcctcgcggccttggacactgctgcgcttgcgatcaaggatttcttgaatacgctcgccgagttcgtgttcccaatcgggattatcttgttcggggttctcatcgtcgagagatccgatgctatcccgaattggttagtgccttgattgtaaaacttgccgacatcattggtgacatcatcccgccacgagagtgggaccatatgaagatacaaaaaaaaaaaaacagacgaaaagcgcaagaggaatactatcagcttacctcatagatgtttcgtcagagaggaatcccgagtcttcttcatctgaaggagctctgctggcattacgagagccctggcgcgaggtctgctttgaactggcgggggagttggtgcgggatgcttcacgggatgctgcctttcgtgagacagtcttgccgctctcgaagatctggcgacgtagatcgggcattttgataggatgataggggaaatcctcgaaatgggtacagttgggaacccagtgtgggaataagtagtaaaaaggatcaagccaagagacggttctctttttaacctatgggtactggacaatagtcgagaattagaagagaaagaagtaagtaattgtgcatgttctcaaagaattcgagtatactgaaagaagaggaagaggagagaagaagagaaaagaacaataataacaataggacgacctcgggactcgtgactgcgtatgtaagcctatcagatggcttcttttacattttgtctggcattccaccaatcagatatagattgggacaatattcctcttcctttgaaactattcatcgtcattgttcaatgtgctactagtccacttacggcagagtttttcatttccaaggttagggaaccatgacagcattggtatcagtatggaggattggacatggactttgacattacgccagctgagtattccctttgatctttctttgaggggtatcattatcatacatccgagaagttggagcctgttacagctgctgccgcaccaactcgaggatctgttgggccttggcgccctcgagatactcgcgaccttcctgtcgccattcatcttcctcgtcttcctcgtccccaatctccaagtccacctgcagactagcattgtaggcacctttgaccgtatcttcgtccacacgcactccgttttgcaccagaactcgaatacactgtgtcaaccgtgcaatctcccgacgggtctgtggcgggatatcgtcattctggctagagtagatggagctcgacaccatttcttccatgcgcgtaatagagacattttcagtagtcgatgatgcggcatcttcatcggaattcttggagataaatatgtacccattcaccccaaggacaatgttcacgttaccaccaccattggcagtggattccgtccacacctgtcgacgagaccgcaccacaccaccagtaccagaacctccaggagcagccaaagcgctgcctgaagccgaattcccaaccccaacgccgcccttgacgctagagctagacgctgcgctgcctccggttcctgtaacggcgaggaaaacaccgttgcgcagcttcccgtacttcaaagaccgtgtgtgtagtgacgccgacccatcctggtgcacgctctgcacttcggcaactacaagatcgccttcgctgaaaaatgttcggatctggagctcgtcggcgcttgttcgtcgacgcagaataccgccgggcagattgattgcggaaagagggagctgggcaagtagcggtgccgcgacgtcgaccttccaccgtcgtgattgcacttcgacaatgcggccaacgacgagatctccaatttcgggggtatagcgggcgcgcagagggtgaacagatagtagcttatttgtcttttgaactgtgccggcaacagtggcaattatagaggtcgagagcgggttcatataggtaccatgacctctgtagattgttagtgctgaaaaaaagaaaatgacgatatgagctccgcattttttttttttttgcgcagcattcaagatcagaccaacctcatccattgtggatcatctgtgaccacttctcctggtgtgacaatccctgtgccaatattcgaatttccttgtaaacggggtcgcttgtgaggccgagagataccagtcatttcgacatcctcctcggagtccatggacatggagtcatctgagtcagcttcgtagggacgggagtcctctaccacaggtgggagaatagtaattgccattgcacagtatgttgtctgtgatcgattgcggttgacttcaaaatgggagtggaggcattcagataggtagagaagaaaatccaggtcacgtgatagccccacactatagccaccaccatttacaagagaaaatactccgtacattagttagattagagctatctcaataccgcatgaagactacatttcatgtcactatatttcaaattaccaatgctaatgttccatcatatcatttaaagccagtgaatcaacccaacgccaatattaatacataaaatgaattccgtttatgaaatcaactgctcaagtctttttggccactttgcttgggttggaagtgggctcttccttcttcttttttgaccggctgctaccacccttgggtctataaccggtgtcctcctcacgcttgcgcttgttcttgggagtaggctgggcctctgtgccgtcctcatcatacatatcctcatctttgcgctgagctggagcccgcttggaagatcgattggaagggcgtgatgcagacttttcagaagcaacctcattatcctggagagtctgaggttggttacgacggagccaattgtataccgatgcgggattccgcatggaaagatcacgctcacgttccgcaaacgtgggacgttctggaatgcgtgcaagctgcgtggcagccgcctcatcacctagcttggcgtccaaggcaaggtagtactcagtctcacgctcgggcgtaaagtatccaagttggcgttcacaatcattgtcgggcttcttttgaacagcgtctggagtgatgtgatgagcccgtgacagggagctatactgctgggctggtgcaaacgctttatttcgtttgatgttgtcctcaatgatacgataagcacgcgtgtcaatgctaccagcagccagtccagctttggcctccttccatgcttgttttgccagtgtcgcatcgttgatcaaaggtacaatttcctgctcgggggttggtagcaagggaaggtcggtcggcatgctcagatcgaatcgcacatcaggagaaacatgtaggctttcgttgaactcgaggagaacctctagcaattgactagcacggaggaattagcaatagttcatacaggagagaatttgtaagtcccatactcgttttgctcttggatgcgcttggacaggtcctctatgcgcaattcctcccggatcaaactctcattctctcgggttcctagctcgaacctgactttcagcttggcatatttcttcctggagaaaagagggtcagcattatccgatgggctgattgtgaggactcgtacttgaaagaccggactgattgcttaggaggcggtgcagtggctgcatttggcaaagttgcagtgaagcggttatcgttcggttctgccatggtgttatggggaagagaagtttagaagagccgggatgaaggggatgtggtcaccctgcgcgttcacgccaagaagcggatccggctgcgtgagaggcggggcctggccgccggcaaaaaaaaaaaaaaaannnnnnnnnnnnnnnnnnnnnnnnnnnnnnnnnnnnnnnnnnnnnnnnnnnnnnnnnnnnnnnnnnnnnnnnnnnnnnnnnnnnnnnnnnnnnnnnnnnnnnnnnnnnnnnnnnnnnnnnnnnnnnnnnnnnnnnnnnnnnnnnnnaaaaaaaaaaaagtaaaattattgttcggtttcctgtgaccagaaacaatctcaggcttctgatagattgactaatattatagtagtcatcacaccattttacacctttcacattatgtcggaactcaccgaagtcagtcaaaagaagcgcaagctgcaggacggtcctgagcttgaaatcgatgtctctgcacccgagccagtctcaaaaaaggcgctgcgcaaagcgaaaaagaacaaaggaggcgatgcgggtgatgaggagaaacccaagtccagcaaatctagcaaacccgagtctaaagaagctgaatcagacgggaagcggtccaaatatggtatctggattggaaacctatcgttttcagtgaccagtgaagagctgcgcatgttcttcaccgtcaacgctgatatctccgagtcaaatatcacccgaattcatctgcctaagggccccgaaagatttgggaggtcgcagaacaagggctttgcttatgttgacttcaccgacaagaagtctttgcaagaagcaattggcctaagcgaacagctcatgaccggccgccgcgtgcttatcaaagatgcaaacaattatgaaggtcgcccagacaaatccgaagcccaggcgaatgccgcgggtgcagccaagtctggccaccctccctccaagcgaatctttgtcggcaatctcagcttcgatgtgaccaaggaaaacctcgaggaaaacttcgccaaatgtgggactgttaacaacgtgcatatggcgactttccaagacacaggaaaatgcaaaggttatgcgtgggtggagtttgaagaactcgctgccgcagaagccgcggtgaggggattcatgttgatcaagcaggatgacgaggaagaggattcctctgacagcgattctgactcggcctctgagaagaagaagtcgaagaagctaaaaccccgcgtgcaacgggtttgggtgaaccagctcatgggtcgccgtatgcgaatggagtttgccgaagatgcgggtacacgatacaagaagcgcttcggaaaggatgccgagaagaaggatgaacctgctatcaccgaagtcgatggcgaatcacgagaaagaccccgacacaagaagagacgtgaatccatcgatgagtctcgctactcgaaggaaaccgtccagaagctcagtggtgccattgtcgagggccaaggtcagaaaatcacgtttgactaagttattcatctgcttcgtggagtccaattatctgcggtctttctacaggaccattcaatcatctcatacacaaatgtcagtggaattctgatacctatcaatgatctgcccgcaatcgaggtggcattgggatcaaactccgaccgtggtctaccctgtgacttaagcgggatcctttggtcatagtttttgaatatttgtacgatctctccagatatccatggtcatcgagtccattcctcagtggcacagcttgcagtgaaatgcgcaagaaaatgtacgtatacttccggatatcacaacatccggcctgcatactagggcgcaacctcaaatttcccagaatacaagcaaagtttctcacataacaatattctatatcaaagccttctgtaactagttgtcaatatttagttcagacactaaccaaatcaagtaaacaattctaggcccaatcgtggcagaaacagcttcaccgcctggactaggcccgatcaggcctgacgtctctcgcgatgtcatgcccttcctctgaactcgaatctctctggacttctcatctctcttgggctgcatctcctttctcctttccccttgctctttctcttcttgctctttactttggttattcttcttgcacacggtttctttttgtttcttctagcctttcttagtactttggtcttgcttgatttcatttgctattccaccgatttatcgtccttcaacgtccgttgtctaccccggattccgtcctctaacctaatccggtcccggtaaccacccagtcaagcgtcaacggggaagacttaagccacccccaagtgattaatcccttgtgtctctaccatggctcctcttcgacgtcatatcggggccagccgcagaaagagacgggaggaagatggtgaagaagagagttcaatggctggtgacatgggagatgactcgttgagtgaaggctcgtgcgatagccaccaggaggacgaagatgcagacggagaagtcagtgaagagagcgaggacgaggtttcgttggataaggcgggcaaggtcaacggttgtggggtagacaaagctacacggaacagctctgcatcccccggaaaacgagtactcaagacaacagtttcggatacagaggcaatgctcaacggcctgaaggtctcagacggtgcgggcgacgctacggacgttcatttcgaagatctgaaggaacaaagggagcctcacgctggaagaacgccttccgcccctccaaccgaatcaagtcgaaacaatttagcttccagaaagcgccgcgagaatgacaagaatgtcaaggaacgagagcagaacccagccttcgtccccactcgcggcagctttttccttcatgacaagcgatccaccgacaacggtcaccgactcaagagcaagtctcgtccctacggcttgatcgtagatggtagctctcgcaggtatgttatattccattctatttccgactcctgtttcttactaacatgattcaggtcttctaagcccgatgccagtgggcagtgggcacacgatctccacgataccgtggctggcgaggatcgacccgcagcaaagcgcccaacaccatccgcgatgcctaatcctggcgcatccgtccccaccgccccgagatcttccccgcccaaccggtccttctctagcacaacgttggttgggaacgtacctgttgttgtttccttgcctggcatggccagcccaattcatttttcttccgtgcccaaaagactccacacccggctacctcagcatcgaccccctttgcgacgcgacaagccagtgcgaatctctcttcccagccagcctccccgatacatatttccctctgttgaacgttcgtttatcttcatcccccgcgcgttgcggccgaaccaagtctctcgtggtcgaggtcgtggtggcggctggtacggtggacgacgccctagctactatcccaactcatcttacacgccgagcattatcagccgtcgatcttcgtttggtatgccaccatctcaggatgggtggccctcacctgctgtgtctgtctactccagacctataatttccaacgactctaagcccgttgttcgtcttccccctccatctcgtccgcctgtcgggatcccaccatttgggcctgcgatggccatgtcccttcctcacccggcctatcgcgaaagccgccccgccccaatcccgatgcaccaacctcgtccccagaagaccgtttctgttgcggacattgaaagtccggcagctttcccgttcactttcaacccgcctcagccccagcatgagcagcctttccaccatcaagtccctctcccagctcatggcccacccagccagccttcggccactccactttcccagatcccggagcgggcgattcatgcaccgccctttcaaccttacaattaccaccagcctagcttctaccctccgagttatccttcgggcggcatgtactacccgccttcggggcccgattacacgggttacaatggacctattggccccggagcttctgtgccaaacttcccgggccagcaagtgatgccgtatttagctggggagcagcctcctccaccaggtactgttgctcatgagtctggtggcaccgtctacttttacgatgccaatcatatttatggaggtcccgcaccaccaggatctgggcctgggggggtggttggcatgggtggaatgatgacaccgccaggcacgaccttctactaccctcaacaatccggtcaatattatgggcagtgatgaatgactttggcttttttttttccttttcttctctctcttattttatttttttcggatctcacaacatcttcaatttccaccaattctctctttgttctcaattctctctcccttttctttcaactctctctccaggatctacaggggccttgggctcactttgctttttctttcttatctgcatcctcacattctctagccaagttttgcccttttttcctcccctaatttttgtcctagtgtttgactcatttcggtcctggattttgatgcatttgagcgttttcccttgtctccaccactttccccctattgtacttggccttggagagaatcacgtcttgattctagcccttgtcagcccttccaaaaccccctcaatcccctcaactctcctccaatcgggcgatcgaattgccgttctgcattcacccatgcatgacatcatattttcgctggtttctatttgatgatcttgtatactccctttatagggtgttttgatgaagacgaaataaaacaaagccactactgccagtaattcgatccgtccacctgggcactaccacatatgtactccgtagactacgtagttctgacaagtcttggcattctcggcccggcgataaacacgtcacattcttatgtaatccatactgaaagcaagccaatccctcaccgcctgccctgtcagttcgcagcagctgaccgtctctccgcttttccccttcaattcgactgcttcttgtacaactcccctcttattttccttaactctcctctgcttcttctactttctccctcttcatcataacagatcatcattttatcttctggtattcctttcttactcgtaactcagtacaatcttccccctttcctttccatcatagtactgctgccttatctcagaggtgtatccaccctttgacattggcatcatctacgatgacaactccatctactacttctcatttcagtccagagaatctggttactgtcaaagtcctctacaatgacagtaaccgtcgcttcaagatgcctctcagggagctgaaggccgagatgttcccccagactgtaagtctccactcaagctccggatctgaagtccgacttatcttcaacgatcatcagattatatttgtatcgaaataatttgttccaaccctcatcagaaatagcgtgttgttttcaactgacttaatttttcgtctagcttaggaaactgctcggcgttccggcggatgtcaacgtcatccttgaacgctattccgacagtgctggctcttacgttcgcttggactgtgacaacatcgcagtctataaacagctctaccgggctgccaaggcaaagtctaagctccgtattaaggttactactcttccttccaaaaacacatccgccccaaccccagtaccatcagaacccactgtgccgatggagtcaaccaaccacactcgtcacagttatctcgaaacagtcctgagacctctaccacctcccgatacccttcctctcattgactcagcccaattcccttgttccaccggtgagaaagagtttcctctcggtcaacctcgctaccgcaacttcgagatggaccaagaaaaacatcagttcccggtcatctcccacgcctcgtccaacgggatgttctgcattgactgcaatcactgtggccggtctattgcaaatgcgcattatcactgcagcatttgtgagaacggggactatgacttgtgtctacagtgtgtcggtgccggcgcatcttgccgcggtgaaggtcactggttgatcaagaggaccgtcaaggatggtgtcgtcacaaacagtaccaccgagactattcctccccgtgatcaatcaggactggagttcaaccccatgctgcctcggcagattcagcgtgaagtgatcactaagccggtggtccacatccctgagtcggtcactgagtcagtccctgagttgatccaagagtcgatcccagagccagcggccccgtcagcttgtttggatgcagccaccattcaaggtgatgacaagccaatgtgtaatggatgctgtcgtggtaagtcttctgtttctcgcctccctttctcttttctctttgctcacaacacacagaagtcgacgaaatcaatctcgtccgttgcaatgactgcgaggactatgatctttgccttcgctgcctgctccgaaataagcacgggcaccaccctggccataccttccacctcggatctgaccggaacttttgcttgaagaatttgatcacgtctcgctgccttcccggtcggcagttccgacactccgctgtctgtgacggctgtgacaaggtatttactcacacattccacttgcttaggaggttcgcggctaattttagctagcgcatcgttggtgttcgtcacaagtgcttggcctgccccgattgggacttctgtcccgattgcatcttgacttcttcgcagagccaccctggccatcggtttgtgcaagtttacgagactatcggtgagccagctcgtgagcacgaaattcactatggcatcttctgtgatggtccactgtgcaagagcaaacctgctcagagctacatcaacggagttcgctacaagtgcgctgtctgtgatgacaccgacttctgtgcgagctgcgaggccctcccgaccaaccaccataaccgcactcatccgctggtcaagttcaacaccccggtccgcaatgtgactgtgagcaccatgggcgacgacggctcaagtggagcagttgtcctaggtgaccagcctcgtgcccccacttgccccgttgagcaggtcgagattgcggagccggaacccgttgaggtggatgctagcacaactgtggagaaggatgagcctcagccattcgtggacgagccccttctcggaactgacagctctgatatgacggactacagggcgttctttatccgtgacactgtcactgacggtacaaagatggccccaaacaccacgtttcgccagacctggactctctacaaccccggtcctttagcatggcccgttggctgtgatgtgcgcttcgtcggtggagacaagatgttcaacgtcgatgtctgccacccgtctagcgtcgagtctattcgctcggccatggaaagcaccaagttggttgcccctgtggagccaggcgagaaggctgactttactgtcaaccttcgtactcctcaacacgaaggccctgctatctcctactggcgtctgaaactccctaacggtgtggccattggtcatcgtctgtggtgtgatctcgaggtagaaaccgcttctctggaaaaagctgagacccacgagacatactctggcgtatctgaaattgccagcagtggcatgatcttccccaagctagagaaggaatctccggagtcaagcacttaccaagccgaggctcctgccccgcaggcaccgagcttgtcgaattcttcggaagtggacgttttagaagacgttgagagcctgactttggacgataccttcactgacgccgacaccggcttcctgacggacgaagaatatgacgttcttgacgccagtgatcaggaatatattgaagccaagcaggccacaaactgaaaatgttcgaaggaaatcatcacgacacgatatgggaatgggaatttgcgcaactgcactcttttttacttctttttcttttcggactttgccgctgaggtctagtcactccgagcatgactagacttaatgagattgataatttttttttggcctacgaaaacaagcaaagaaaaaaaaagaaccacattttttgcctgagatagttcaatgcactttcgctgttttgaggatttggattgtgtagtacgctaaccctattaagcattgatataagcatcgacataagcatcgagtccttgcctcctccctacatgtatgcagtcaccaagtctccctgcgagctgccaagagttccaagtttctgccctcgcagagattcccgaactgaataacctcgggaattcagtgaggggtcgagaaatggctataaatttggactttgtccctattttcgctttatatccccagattcattcacattcgatacaatgggattaagcatcgtcggcctcggcctagtcgctctggtcgccttcttggctggtccagtcagccatttcgtgcagattgcaggggtcttcctcacgcctaatccgacagtgctagctgcaggccagggcccaatctacatccaagacaccatccattgcgaggatgtgcattactaccgcccggcgaacctgctgttcactgcctgcgaggacgacaaaagcacgcggtttagctggttcccgccaattggccacttcctgccagtcacgacccaaggctctattcatgtcgtggatcccaaggtgactttgttcgaggcagattcggaccaaatatcaaaaattaaccccaaatatagactatgaaatcgactcgtctggcattcgagaacttccaaggcaccttcgtgacacatggaatcgatgtcatcgaggaccccgaggactcagacgccgtctacatttacgccgtcaaccacttgcccaacccggcatactttgaagccggcgagcccaaagacgtccccaaagcccagtcccagattgagctcttccatcacgtcctcaactccgattctgtccgacatgtgcgctcaatcagccacccgctcattaaaacccccaacgacatctacgcggtcagcccagtctccttctacgtcaccaacgaccacttctaccgcgaggggcccctgcgactcttcgaagccgtctggcgctcagccaggtggtccaacatcatctccgtgcagatcgccgatctggcaagcaaagacgcacctgtcgaagcctccgtcgcactgacgggtctatggaacaacaacggtctcgggcacggccgcactgacgacgaagtcgtcattgctagcgctatgggtggcgagatcttcctcgcaacccggcatgagtccaatcactcactctccatcgatacctcgattgccttttctagttctctcgctgataacccgtcctattatgaagacccataccgcactgactcgcatgatgcgagcggcttcctcgccgccggtatctcgcaggccattcgctttttggggaatgctaaggatccgaatgccaaggatccgatccaggtgtggtatacgactctcaattcgcacactggggtctgggagaagaaggtgctgtttgaggatgatgggtctagggttcggactgcgagtgccgctgttttggtgcctattgagcctaaggctagtgaaagactagcttggctctttgttactgggttcatgtcggagagtatggtggctgtacaggttgagctgtagattagaattgtaaaacattacgcactcaaaaaaacaaagaatgttggttgttctttgccctgactttgtctatataaattccacttcctcccggattcaactattcctcttctatcttacactatatcaaaagctctatatatatttcatcaacttaccatctttccagctcttactttatatacatatttccacaagttccaacttatcactctactcgcgtacagaatcgttgttgagtcgagagaatttcagaagtatgtattttgtaagactgctatttctaccaaaaccaaccatcccagttcaaaccaagaagccaaacgaaacgccattgtaggccgtctcctctctatcaaccttgatcttgtcatctcctggtacgaaacacaacttcgagacctgcgatggggaagaaataggaatgcgcaaactcctagctcagccaaaagccttcctggtcttcacctctccaaatagccatgtcgtcgtcaaatccggccctgtgtggagtcttacatatatacaaggaatactatttattcaatatggggtatatctcccgcccatcctcgttgatctaagccgacagctgacatcttactatatagacaggaccaataatcaccagtcattatcagaggtctagatacaccggatcttgttgattcctagctcggatatggatgcagcaaggagggaattgcaacagcgtatcgacgaagatagtcgaggccctgctgaacgctgtgttgcgctcctctatgttcggtggatgatatccgcctacattgcatactgcgcgttgcctctgacgatcctgttgtctttagaaacctgcgactattttccctgcccgacccagccaattcctgccgccactgtaccaatagtcgcaggtttctaaagacaacaggatcgtctaaggccgcgcaagacacagtactatcagaagttctaagttctagcccggtatcaggtttaaaaccaaagcaactgcttggattgcttcttgatacgtcgattcagctttgattccaagtatattcgttattgtctcctcacatggaaaacagggccgcgatataattaggctcgagtaaacatagtggttgaaaatcccaacacctttagagacaaagttcaattgggttgacagaaagcatgtagatgtctgaaattgaagtgctagcgccgctgcaatgcaaattggaagaaaaagccaaggtaaataacaagatttaaaataacaccaagtagtacaccacattcatctcatcatttgatttctctgcttcatctgtctgacttgcccggagtctgggaagagaatgaacagtacttgtccttgatcgcgatgacctcgtaagttccctcatcagaggtcttgatggtcttgacgttttcgtatgaaatgtcgtgtttgatatcaagaatctccgacttctttcccttgcgggcattggagctccgaatgtatctgtggaatgttagcagactgtcatacagagcatagctagagactattgacttacgtgaattcgaatggtggtgtaccccagaactcaaagtgaagctcggcttctccaccctcgtgaatatccaccaccgattctttacccttgctgatccgcacgctcggcatggcgtggataaccttggtgatgtctttgtgggccttgcatttcccactggctccgtcactgacggcgttgatggtgaactggccgggaagttccgcaatacgacggaagttggtggtttgtgtagtggccttgcgcttggcgccatcgaacgtgtagaacacatcaaatggagcatggcctgacagcgcgaatgaaagtcgttcgcccacacagtagtccatcttggactcgagcgggacaattgtaggaacgtcggagatggcgacccgcaccgaggaggcatcaagctcagtggtcctttgacatcctcgagaatcgcgaaccttgtggatgctgacttggtgttgccccaagtcaagatggcgacgaggaatcagcaatttatggcgattggaattaatcttggaaatcgtgacaatctccggtttggcgttcgagtggtgtttgatgttgatctccagcgtgaatggtgggacaccctctaaggtaatggggatggattcctcgccgttgatgtcttccttgcagaagccaaagacgtggccaggttggtcgaatttagcagacggtagcgggttgaccttttgtgtcacaaccagatcgttgctcttgggatcgtggtcgtagaggctgtcgccaacttgggtgaacttgtagctgtattctccagcctcggaggtatccatctccatcgaagtcacatgaagagcagacttcaaagcccgtggcttcgccgcagagaatcctccacggtccgtcttgcgtcgcttctcgtattgaacactgtatggaggattgcccgacagccgaacttctaggctgtcatcgtcgccttgacagacctcggactttgcaaactctttagcggctccaatgggtgagccgtccagggcagtgatttcgggccgtggaatccacgagacctcaaattcctttgcagactggtccacggttccaggacaaccggcgtcaaatacttccatgatctcatacaagccctgcttgtcgacggccaagacactgttttcgtcccggaaggttttctgaacgggcgccgattccgcgtcaacattcttgtacttgacagtccaagggcgctcgccactcagcctcaatggaagctcaatcttggagccctgcaaagccaagacacttctcttcttgtcaatctgaccgaaagagacgtgcgggggctgcgagcgggcttcaatattgatgctgtccttgagagttcgtttgcaaccagagatatccttgacgctggtcagagacacggtgtagtcaccaccgctgaccagtttgtcagtcatgatggttgccacatcggtatcggattcgagtgtcttcctgaatcgcttcccattgtggacgatctcatattgcaagacccaaggggcctctccaaggaaagatacttccagagaaacagcctcaccgaaacaggcagttctcaatcttcttgataggaaatgagccgaagccggcggttttacatcttgttcaagcaccggaatgttgagagaccgtggcgagtagacggcatcttcgatgtctatgaatcgataggtgtatgagccggcttccgacggggtgaaatcaagctgcgtgcgcatgccatcgatggtttgtactttggaaacaacgcccttggagctctcaatgctgtatcggagagagaaaggaggcgatcccgtgaggtccaaatccacaagtaacccaatagcgttgttggcacagcggtcgaatatcttttcagctttgactgtcaattctggctcaggcgggttatgcaactggcaagatgaaggttcgaggatctctccaggacaaaacttggtagagattgatgtcaaggcatacaaaccaggctctttgatgtctaaagtctgattcatatgcttcagatcgacgatctgttcacgtgctgcttcttggttgttacccgtgaacgaataaccgaccgaaaagggaccatcgttagtatatgcgtgaccgtcgggatgaaagctcaaggggaacctcgtgctgtctcccttggccacttgcagcggattctcggaattgcacgtttgcagtgacaactgcgggcgctcgtgaacggagaattggtaccactgggattgcgactttgtggacggccgatctccttcatcaaagatggtagaataattggccacgtttccaatagcatcatggacctcttcgatggtgtaaaaccattctccgccgtcgttcaacgattcatttaatggaacctcaatcttttgactctgtgcccacgaaacgtcgggctggttgatgctgtacagagcagccgtagttcttccattgagcagcggagagcgcagatgatcgggctggatgttgaggaccgagaagccacgatcgagattgttgacctggcgactgtatttgatcttcaacggaggtgtgccttccacctccagtttgaagtcggataattctcctttgcacttgtcgatgtgtgagtttttgatcaaggctcgcgggcaagagaccaccagcgcatcaaatgttcgcgtatgaacatcaagctgagactcgtccaccacccgttggagacgatagacacccgttttgcgcacagggaagagcaagtcgcggtggagttgacccggaacatgcttcttttctgcctgctttttaagagtcttcagctgcttcgctggaatgctaatggtttcattttcgccggtgttaaaatctagacgcaacacttcgataaggatcgggtcggtctggttgacacggatgggcaggtcgattgtggattgcagagaatcgaggcaaagcgagtttcgatccggattgagaacggcagatctattataatgtcagtatgatctgaggtgggtatattcgaacgggatagcttacccctccggcagaatgtgcacaatttgccttcccaggatcaatgacgcattgtgaatgatatcgccgggcttgaccctgcgctcagaaacggataattcgcgatcgtatgccacctttactagtccagtaaaccatgcagcccaaggaatctgcaggcattagcgcggatcgacagtttaaaaaaagaagaaaaaactcactgggatgcggaacatcaaaaagacattgcccacagcatgaagaaggaatagagtgagcgtggtcgggaatgcccactccagccaaggtatacgcagagcctgcagcccaaccaagaagattccatcgatcgtggcccatttcaacaacaaccaggttgagtcgaggtcatcggacgcagtcaaggactcgtaaatccgccacgcattcaaggcaaaatatattgcaacgacatagagtcgttgagatggagcatcaatcaaattggtgggaatcagtggcacatcggtgttcgcgttcgggggtggtggtcttgacgccctcgaggccgatttggatggtgatctgagtggcgttcgcccagcccgggtctctcgtggctgcgatcgcgaaggagtctcaaatagttttctccttccagttccagggattgttttaggtgtctgcggaaaggcagatgggaggaggggagtgccgttcatggcatgctgtggttgccggagctggcgaaagatgggggatgtagtgagagtgcgatgctggcccttctagagctgtaagaagttctaaatgaagtccaaggaaggtgtttggagctgtccagtggtaattcgtgcctatagcagatggaaaaagaaacaaaaaagttggagacgcgggaagcgcgtcgggagaagctcggcccactcaacgacatgacctaaccgcttctccctgtccctgtattgtcttctattgccgacgtctggtgtctagttctataaaagatctcatatttttcaagatttgatacctggctccctttctgttcccctcagtgggaagagcaaacttactatcatctcaggactccttttatcatagcttcctctcatttcaatctcatcttgaagctctaaagctctacagctctacagctactacttttgaaaagaaccgaaatgggtcctcgagttaaaaggcgccgcctgatggactcagacgatctcagtgatgatatctgccagcctgcgtcccgtctggaaaaagacagctggaatgggttttgtgaaatcgaatcagaaccggtatgtttaactgacagtggccttagcggttctttgcttacggaattaggccttatttaatgtgatgctacgtgaattccaagtcaagggtgtaaaagtccaagaagtcgtttctctcgacgaagaaatgatggcatttcttaagtatgttacttgcagtccctctctatgctcttacatatagactcgatggctgactatgagcagtaagcctgtttacggcttgatttttcttttccgctggcgtgaagataacgatggaaagcaggaagcgacttgccctgacgggctgtggtttgcaaaccaggtcagtcccctattctttggctgaatggtcctttactgattctttatagaccgccgacaattcctgtgccagcgtagcactactaaacattgtcaacaacatcccagatattgatctaggagagaatctacggtctttcaaggaattcactatgcctttcaccccagcgttgcgtggggatgcaatcaacaactttaaatttgtgaaaaggatacacaactcatttgcacggtaagcccattggcagcttcttgaccacccagatactaatttgatattagaaaaatggacattctcaattcagatttacacctcaagactgaagctaccactaggaaaaagggatccaggggccaaagtgctgatgaatccgacgccaccttccatttcattgcctttatgcctgtgatgggccaactgtggaagtttgatggcctggagcgacagccacaagcacttggtatgcactcttacaaactagttgggatgacactgctgactttagtaggggaatgttccgaggacgactggctggaactggtccgacccaatcttcaggaccgaatggctgcatacgaagaagaagaaattgaattctcgattttgggactcgtgcgagaccctctgactgatctcatcaacgacctggctgtcaacgtgagaactttggaaattctcaacaagcgtgcctcatccctatgctcattatcagatacgctcgatttgcatgaatctgatgaaactgtacttggccctgacccttccctatctctgacacgcgaagagattgatgtggcagtgatcccccaggaagcactggatgattaccagacgtgctccgatgagaaattgcacgagtatcggcagaagataagcaggaggcagcgagaactccgtctacgcattcgcgaagagcagctatctcaccggtcggattatgactacgcagccggacggcggtttgactatgggctagcgatacggacgtggctccgactcttggcacagaaagaacagctgcaggagatgtcgacccccgtggcctattgattggatgatatctgctatccctctccttttctatctcagacgtgcttatcaggggacgtagtgatgtgacctccgtttccccctcaattgatttggcgtcgagtacttcctccatgtcgatcatcctagaaatacgcaatatataccagaaatctaagaaccataacaacagtcaacgtcaaaatataaaagccctggaaagtgacgcctcaggtaccccaccgggcaaaaaatagttcaaacgtcaccgcctcgaatgttgttgagcttctcttttccaacctcctttttggatgatgaacttttgattttggcgtggaagtcttcggaaacttgaaccatcctattatccttgtttcggaatagaggcagggcccgagagatcccctctctccaatttgccaccctttctattctactccccatctacctcaccctctctctttctctttctctacaattcctcgcttgaacatacaccatgtctgctgtcgcagtgcctgaaaaggcaccagatgactcctccaagctgaagaccttcctctccatccttcgaaagtaggcaacccttccttggcccccgctccgctccgctgcgctgatatagccagatctcagacactaatatgatcgggaattaggttcgtcggtgtcgcagatatcgcttcagttcgcttttcactcccggcacaactgctggagccgcgaccaaacctgggtaggtcattgttcgtgttacgctgtgcggggtcagtgctgactgtggatggctacaagaatactggcattatctagatcgaccggagacatttgcgaggtcaggaaatatgcccatatttggcggacgcttgtgtgctgaccaggagctacagcattggcaaatcggatgatgagctaggtcggatgttggaggtgttgcggttctggttcactaaggatctggtatgtttcggctgctcggattcacttgactacttgctgattgtgctacagaaatacgtcaaagggaaaccctgcaaaccatacaactcaaccctgggggaattcttccgagtgagtcccagtttcttcggcatttcaatcacggcaatccattgctaacaccctttagtgcagctgggacgttagcgacaatatccccgaagaaacaaatcttcccggtaccaaaggaatcaccaatggctcctccaccgtaaccgacggcgacgagaaagtcaaagtatgctacctcacagaacagacctcccaccacccgccagtctcagcattctatatcgactgccccgaacgaggcgtctcagcgcgtggatttgaccaactcagcgccaagttcaccggtactagtatccgggtgagcccgggacagcacaacctcggaatcttcgtgagcatcgaaaagagaaacaacgaggaataccagttgacccacccaaatgcccacctcggaggattactgcgcggagcgctttcagtcacagtcgccgacacatgctacgtcacctgccccaaaacgggcctgaaggcgatcctgcagtacttggaagagggctggattggccggtcacagaacaagctcgagggcgtaatattccgctacaaccgggacaatgatacgatcaatcgactgaaagatgtaccagagagtgacattgtcgctcgtatcaccggctcctggcatggaaagatattcttcactccggcgggcaccaaggagccccgtctgctcatcgacataaccccgcttaatcccgttccaaagaccctgcctccatccgaacaacagctgtccaacgagtcattgaagttctggtcgggtgtgacgaacgccattgtcgagaagcagttcaaccaggctaccaagctcaagcaggatatcgaggaacggcaacggcagcgggctgcggagcgccttgagaagggtactgaatggcgcccccggttcttcactggcgccgtgacgccgttgggtaagccggagctcacagaggaagggcaaaaggttttggagggaattcgctcgggcaacttcgctttgacggaaagtacagagcagggcgcatagatctcattgtgtttcccttgtgtaagcaacgttggcgtatctggcatgcgaccatacaaccatcgaacacggcgtctctttgttttactcccttttgatctcttttctggttatacttttattctcacatagaccttattctttagaaatctgttttggattacaaaattgaaatagtatatcatacataggttcaaatagaacgattaattctattcataaaaagaatcacaaccgttggtccatgctaacgccgccagactccaatcatcaagtacgtcaacacataatccatttcagatcccgagctcagtctcaggctgcggcactaactaccttgaaccctgtactgacggtcttggtaatctcctcattcttatgcggcagaagagacagggcatacgcaacatcgttccactgtcgctctgtttcgcaacgaggaagtcgagcggccagcttgtcggccagctggcgagcgtgtttttcctaggctaacattagcatagatcattataaacgaagaagagagagaaaaacgtaccttctcgacaaaaccgatcaagaacttgacgatacggcggagggatgcttcatctagattgcgctctgcactcagcagactgaacatgtcaacaaagtggttgtagacggcattgtccttggttgcaagttccgtgaagaacatgcgagccagatccgcgatcttcttgtcatcatcctctagacatttcgccatctcgcctagttgtcccttgaccttgacttgcccagccaagatgaggaaggtaagggtcatgagacaggtgcgcttgacagagtcatcgtcatcattcaaacgacggtagaggaaatctgtgttctcgtcgatgaggtggttgaagcaaacggccatgtcgcctagtgcaatgacagcattgctacggacgataggatcttcggaccgctccatgatagtgatcaggagtggcaggttcttctcacagtactcggcagatacacacatgagtttggcaaggcagagcgtcgcagaggcctgcaagtcacgatccgggtaggagttattgttggccaaaatctccactacaagcgggccaaatttggccaagagggaattctctccatagagtagctcgcgttctcggatatgggccatggcttcctggaagtcgtcttctgttgttccgccgataagatcaagttcgtctgcttcggcattgtcttgttcatggggagcagtggctgctttgttcttctcttgttcgactttgcggcgtttgaagtcaagctcacacagctctagatgcacgatctgtttgattgcgacgtgaccgacaacgtacagcaactgtgagagtgcagcggatgctggcttaggcttggattcctggccatcgacggatgcagtctcaggccgttgttgctcctcgtctccgctgatagaggcatcggaggaaggtggacgctgttgtaggtgtggcgcaaagacgaatctcgtctttcgtcgtaggatatcagagcaaataacgtcaggatgcttggacaaagtgtaaatagcgttgagggcatgctctgccactccataccattccttgctggctgtttcgatctcaagcatggctaccaacttgaccaaaaccgagtggtcgctagcgagtttgggaatcccaacaacctcctttgatttggcttgacgcccggggatcatgcgccgcaaagcaatacaagtgtacttggcgagcacaaggtcagcccttcctaagccacctagaccaattcgcagcatggcctcgatctcttttaccacaatctctggatctgccagagcaagcattccgagaacaatgatcgaaccccggcgctgagtccgtgagatttccttcttctggatactgtagacttgccatagcttggcaatcactgcgtcagatacgtttccagccttcatcatcgtgctgagcaactgctcgagacaggtaagttcggcaggagttgcaccaaacgtcaaactgatcatgttgcgggcgatgtagtttgcagcatcgttgggtgtgaaagagcctggtgcatcgaagaaaagagccttgtaacaatcaataagatgtgtctggacgccttttccttcatcgctgttgcccttggtccaaatcaggcgcagcatgcggcgaattccactacgggcagtctcaactttgtatgcatcgagaacaacaaagaaatccatggcttcaataacctcgctcttgttccgggatgcgagtaactgtgtcacgataatggacccggaatgaagcacttcaataaaccggattgcctcgttgtaatacttcctcgtcagttggaggcgtgtcatcaattcagaggtggccgcctgttctgcggctttctgcacagcaacagccttctgttcatcactcatccggggcgcttttgacggggaatcatccgggatctgtgtagcgtcatccaacaattcgggatcaacctgagtcatgtcgcctgccccaaagccgggcgcttcagcaggacgcagggaattcaactcggcgtcaaccgcgtccattctatcagtccactcctttaatgagaggagcccgccatgcataacactgaaaggatgtgtggaaacaagcttggacagcagtttgatcgcgttgcgtcgcacattgctgctcttatcctccaagcttctagcggcgagttccgctgcagcctgtcgccttttcgggaacttctgctccagatcgcaaatccgcatgaatacctggatcgcgcgacaccggcagtaagggttgatatcaaggaacctttcttctaatacgtcgaaaaaggcgttgatctgggtcttataattatcactgcgttcttcctgccgactgagatcggaaatgaggtttccacagacctcaatcactgcacagcgaagagtatatgcctgtacctgttagtggagctttgggcaaattaagagtatcactcacgtcactatctagctgtttagccagaagggtcatttgcttgatgatcaatcttggcgcaagttcggacagtttgataatgaatgtcgatacagacttggggcctctcgtatcattagaattaaattccttatttccgagctccctacatgtaaagttagcaactatccggtcggtttgctgatataatctcactttaggatctcgtcggaaagctgtggatagtcgtattgttctgctagaatatgcaggaattcggccatgggttcagacagatgttcgaagtaagtcaagctttgcacaatcgaagtttgagctcctatgctagagtcagctatcgctcagccggaatatgcatcaggacacctaccaaaggcctggccatggtgcttgactgcaatgcaaagaaccttgaaagcatgcatgcgaatggccatgctcttcacccgctgctcgctctcgaggaccagatagattgtgcgcgtgaatagggtaataaaagtgtcacgatccgaagtggtcaaaaaaatgcgtcctagcttgagcttcatcaccttgcacatcgtctccatggatatttgaatctggggcgtccaatcccactggccgctattggcggatttcttagatttgggtcctcctcgtcgaacgggtgctgcctcggtgggcttctctgcagccttgacctctacggcagacaaagcccactggagaaggaacccgtacatctccaaaagctgcttatggtgttgaataacatcctgctcgtcggattcaaggtctccgtggatgacgtctgcctcaacagacaggccagaaacaaccaaatccaaaagtttgctcaagtgctttgcaggaagtagggtcgcgtatctgcaagagtgaaaaggatcgtcagattcgagtccaagcgggcgccagcctccatgggcaagttgggaagggaccggggcgcactttagtagaaattgcagcgagtcaaataacgatgctcgtgttaatgcctcggggttctctgccacagcgtccacgatcgggttcaagatactgtcaatcagcgccggcgaaagttgatccggatccgattcgcaatccaacagttccgggtccgcatcaggagtcgggatcgaagcgggatcactcaaatagtacttgagcgactcatttatgttgaactcgattctgtcctccattgtggtgtcaaatgagaaaaagaggtgaaagcggggaggaaagccgatttgttgataagccccgttgtttggcttttgcctgtttgggtgcagcttatgtcatcatgttgtattttaccgctaatgctgtgccagacccctctcatgtgttaccgcaccgccttgtattgattgatttggctaccagtcgtattgtcatatttgtcacgcgtggtaatgccaacctaggttgttgtgtttgcattcttatctcggcagttgcgatagaacattgaaagaacttgactttgaagcaacacgcgacacgatcttatgactttgtttctccactttgtactcagcacattgaattcgaagactcctcattgttctccgtgccaccatgtcggccatacgcgctgctcctggtgtatttgagctgaagcgcaacaagtcccgtcatgagccacaattgcaacacaaatactcgctgggacacgacgatgaaccggtctcgccaagcgatgcaccccaggagagtgaatatgaggaagaggtggaggaatcggtcagagaggatatgagaaagcttgaagacacattcccaggaatctcggatcgcttccgtctggtgaataggatcggagaaggtaggacttgaccggttccccgtcattggcgggcttctttattgacaagcccaataggtacattctccacggtttataaagcagaggaccttcattatgatgcacaccaaaatgactgggatgtttcaacaccaacacaagacaactatgcggagcctccatccaaacgacggcgattcggaagggagccaaccggacgaaaaaaaacgaaattcgtcgcattgaagaagatctatgtgacgagtagcccgctgcggattcagaacgagctagaactgctgcacgatctccgaggatgcgggtctgtctgcccgctgatcactgctttccgataccaggaccaagtggttgctgtgttgccctatttcccccataccgactttcgcattcaataccgcacattcatggttgcagacatgcgccattatctacgatccctcctgaccgcattgaactcggtacatgaacatgaaatccttcaccgtgatatcaagccgacgtaagtttcattcttcgacggcctgaattatgctaatatcttgaagcaactttctctacaatccggacctgaaagaaggcgttctggttgacttcgggcttgcggaggtatgattattgaccgccatatgttgatgcgtttactgattgtccccacagcgccaaggctccgaatacaccaacccatgtctatgtactcatcaaagctacgtccgtcgaagccggatcctttcaagttactactccaagaaccccccatccacggggttttcagccggctaccctaagaatgattcacggccatcacgacgagcgaatcgcgctggaactcgaggctttcgtgccccagaagttctccttaaatgcacgtcacagaccacaaagattgacatgtggtcagtgggtgtcattcttttgactctactgggacgtcggttccccttcttcaactctgccgacgatatcgatgcgatgatcgaaatgtcgagcatcttcggcaccaaacgcatgaagactgctgcggccatgcatggtcaaatttttgaaacaaacatccccaccatcggcgagaaaggctacagctgggagaagctggtgaaatggtccagctgtgtagaagatttgacggaaagtgagcagcaagcaacacgcctcttgtctggactgatggaactggaaccgtctaagcgcctcagtgccgcggatgccctggagcatgaattcttcacggatcccgttcaccatgatgtgccatggggaggtaacccagaagaaagcgcagaatcaggagaggaggaggaggcagatgatgcagacgaggttgccatgctatgagacccaagattatttgtacgatatgtgagatcagttttacgccatacactgcataccactttattcagggcaatgaagcagccttcatatgaacaatcccgctgtatgcctatctatccggtatgcaatcttttctagctcgcttctccgaaatcgtagtgcccggtctccgcggcatgcttcgtagcacctttctctccggtgaatttgcctccacagacgttacagcgaacagtgaatccagaagtgtccgtgtagtagtgcttgctttgcaacacctggcatagttctttagccctttgcaagacaaccggatcaacagcctcaaagatctttgtgtcatcatgcgccagtggattggcacgagtgtagggtgggtgagaaggggacagcgcaaggacatcgtaatgaatccccgaatagaccacaatacaccgtgttggtgctccctcattaaactggaacatgtgcaaagtctgtacatcgatggagcatatctcgatattgaagtattcgctgagaatcttgagttcgatggcgccaccccacgagtcctcgttctggatccaggtacagtattcgtctggttttttgcctaaaatcgctgcagtatattcggacgggttggattgaatagctcctgcgacgatcgatcgtagctcaaccatcgtatccatgtcgcccatgactgcagagcccactgctcggaaaaggcacgagttgtcgtcgggcatcacccggagaacgaacgttccggcatgctctggagaggcaatttctggcgggtcttcagcggtgttctctggtcgtctttgcgacaatgatggctgcgacggctgtgatggttgtggtggcgctgttcgggctatgggcgcatcatcgctcacgccccggctggccccctctttctgtgcgacgatgagtgactccccatttagatttatcccaacttctaatatcctttggtctggttggaagctgtcaagctcaagtggtttgagagggtatccgtatttgacgtcaaaggcagcaaggccggtcttctccgctatttgggtttggagatcttcgatggttgcagtgtcatccaaggtgacagttgattggcctgaaggcccacggactcggattctcattgtgatgaagtcccaaagaggccaagacctaagggaactgtgaggtatgttgtagataatcttaagaacggaggttccactgatagggagatatgacgacttccgtgtggggtagttatacctgggtacggagtataccaaggcagtctggaatgcaagccaaatggtatgggccctaagaagagatggactgatatgtaaatcagtagtctgttcaaatctaaaacagtgaagtcgcaaaagactgtaagtaaggggagactacccaccaaactaatcattgcatgcatgtagccaagagctgcatacatattgtacattgaaagtacgctgaggcgtgataacttcaattccagtcacagcagacagttgtagcaaagatcctcatagaagagacgtgaatagagacatgattgagcccaaatacagcctcttttaatgaaaagatcatgaaaggtgaggccatcgtcatggaatgtcacgtgaaatgtcatggattaccgtaatgtgaaatggccgctgagtcagcaatagcttcacctgtccactggacgcgttggtgaaacatcctccgacatctacagggtcccctattgtcttatctgaattcgagcttgcttcatttgatttagtctaaaagattgctaaatttacccttgcgtggaaacgcgcgtgtcgccaacgacatggagtccgaaaaagagctatcgcaacccccgcgcgagcaacccgtcaactccatcgagaatgacggtgcgatcacgcgcgaaacttggaaaatcatgatggatgtggtcctggcaatttatgactaccgagaagaggagtgcgactgactttatatgagatatatagcgatcgctggctaattgttatcttgcgcagtggtcatgacccgtcacgattgttccatcgcagtgtcaacaagcgctatgttcccgactactatgagataatcaaggagccgatggccctgagtattttgaaagcgcgcatcaacaaacgtgaatacaagcacttttccgaatttgtccgcgattgcgccttggtgagtggttgcgccctccagatttgcaactagctaacgatatagatcccacacaatgcgcagacatacaacagacccaaatcacaggcctatgaagatgctctagttgtcaaagtatgtctgagtaaagccggtcaccctgggcattcaactgacagtttccaggaagttttcgccgccgagttcaaaaaactggccgcccaaggcctgatccccgccgacgaggcagagctacccgatcttggagagatcccagaggccgatccgctgccggatgatgaggaggaagaggaggaggaggaagaagatgaggatgacgactctgaggatgagggccgacgaagaaagaagcccggtcccaagcccggattcaagcgtggactgactcaaaagcacgaacccgaccttcgcaagaaacgaggccgtcctccccgcgtggacacacctatggaaatccgcatcaaaacaattctgaagggaattaggaagttcaagggagccggtggccacctgaagatcacacactttgaacgcctgcccgacaaatccgcttatccggactactacctggagaccaaggaacccatcgccatcgatattatcaagcgcaagtccaagcgcaagaagtacaactccgtcgatcatttcatgcgggaccttgacctcatgttcgaaaatgccaaggcgtacaaccagtcggacagtcagatcttcaaggatgcggttgatctgcaaaccgagtcacgaaagttggccgaacaagaaaagaagaagcctgatagcgagttcttgatggaagacggacgcttcccactccctgatggtattctccaccgcggtgaactgtggaaggttggcgactgggttcatatccaaaaccaaaatgatgtgaccaagcccatcgttgcacagatctaccgaacctggcaggactccgatggggagaagtggatcaacgcatgttggtactaccgtcctgagcagaccgtgcatcacgtcgacaagcacttctaccccaacgaggttgtgaagactgggcaataccgagaccaccggattgatgagattgtggatcgctgctttgttatgttcttcacccgctacagccgtggtcgcccaagagatcttgcaccggataaggaaatttacgtgtgtgaggctcgctacaacgaggagaaacacaagttgaacaagatcaagacatgggccagctgtctaccagatgaagtgcgagagaaagactatgagatggatctctttgatgtgccgcgcaagatcaagaaaattcccagtccgatcaaacatcttctcagagaggatgccaaggagaccgatgaccttcctcggccaacctggggaaccgacaatgccccccctcttgccggagctgttcaccgccgtccacgagatgagaatgtaagtctttttccccccacatgagaaaagatcctgaaagctgacagcattaggaatcaccaccacccgagccaactccatccccgcctcctccttccttgccccagtctgtagtacctcgtcaatcactgggcctgggccaatcactttccagaacagccatgagcccaggcactgctggactccaaacacgtactccagcacccccaatcatcatacacactactcccgcccccattcgcccaccgggcttccatcaaatgaccccatcccaagcctttacggcgtccctccagcgccgcgcaagcaaccttgctaccccgcaaaccccagcaggcgcataccagccctcaccatcggcccagcaaacccccgccaccggctactctcaaagccgcatgcaagccccaccagccgtgtacaaccccaacgcaccgcggcccattgaggtctttcacctgagcgacacagccaacgctgccatcccagaagacatccgcgaccaatttcactgcgacgaccaagggcacgtgctcttcttctccacaccgccggtggattttatcccgccctcgaagaagaagctcggccattccctcaaatacctcgctactaaggaggagcatcagaggaaggtcgcagagcggaaacgcaagctggctgacgagaagatggaacgtgatgaggctgcgaagcgccagcgcgctgaggtggagactgcgcttgcggcccgtgccgaggcgcttaccggtaaggcgcttgagaccttggtgcagcacgtcgttgcgggtacggatcagctctatgaatctctccattaagcatggatgatgctatggaccttgatggaacgtgcgagcgtggttctgcgaggaatcgccaggctatgggacagtctgcggagaatggtttggtcaatttggaaggtactgctttgtacctgcacaaggcttacggagaaaaggcgaacatactggcgtggcttggcgtaatcttcggaggcattctgttttagtttaagatgtgtatgattaggtatcaaatgaaatgattattatgtatgttactcctgttagttctaactagccataccaacctactccttttacgaagactagtatcaaggaattgtttatttgcacatctccagtttgtacatgcctgcagtcctgagaatcaaaaccacatattccgacagtaggggacaaaaaacaagggagaagaagacaaagcaagcacctagtaagccccagagatcgcagtggtcgtggaatcatgaaacaaaagcagagatagtaaaagaggcgagatatgtcaacccaggtacagtgcaatatccatgaatggaaacgaataaaaaacagagaaaaggcagagattaatacagtaaatggctggttagagagatcctctgaaggcccagcaacgagaaacacatatgactggtctaaatgattccaaatgatggaataaaacaaggcagatgatgctgagtgccagtttatgatgagagggatgtgaagtttttttttttgtgccttttgtttttgccgaatcagatatctcacttgaggagaaaaggatgtattgtcttcgaaccttcttttgttttgtctctttgatgtatgttgcccaattgaactccgatgccctttttcctgtgtttttggtgagtatgaacatgtcccaatgttggacttggacttgacatgtcgtgatgaaattgattgaaaacaaacgacagattaggaggaactttctttgttctcagtccacgaggcactggtccgcttgtggccgacctcttcctccatgtcgaagaccaggtcactctgctcttcctcctcaatcttgcctgtgttgacaggaggggagatgattcggtcaaatcggccgataggagtaggaccgataggggtaggattgctgagactgctaggaatggcaggcgacggacgagcagaaccagggtgaaggcccatgccgctgagctgctcggagataatggacattgaggattgacgtccagggctcgagatgaacgacgcttcgtgggatacccggctactaccaatgggtcccaggctagggctggtgattgggttcagtgatgactcacggagaggagagccgatgtggaaagaggaagagccgtgagattcctcttccttgcgctggcgctgcttagcaaacaatgcaccaaagcgagacgggctcgacgccaggggagaaccattcttggaaaagctggtgctggtcatgccaaggccagtgaggtcgcggtggctggagctgaggtcgttatcggtccgggagaggcggcgcagcttttcctgtggagtcagaacatcgtcgtgcagattgaatggtaggtaatcctcttccatggggaagttctcatcccattcctcaagggccgtgggacgaggaacactagcggaaaacatgcgtggcctgacggggcgcgacgagtgcatgaaccgggtaccgactgtatcttcaggggcgggaggagaagatcctatgttcgatgaaggcttgcgcaaactggtgccatagccgagatcgcccaggttccggaatatatctgcatgagccggtctctggggtggtggcgattccaatccaaattgcgagggcatggaagcagccaccggaccgtaacgggcagcatgagagataccttgactgtcgaaggaagccgggagccctgcatcgagggcgctgaggtggttgttattaggcgacatgaggtatcggacatcttcagcgggagatccatacttggagccggcatcggatgccaggcccgtatcgatcgtggggattccatcataggacggctgttgctgcccatgcagggattcatactcctcctgtggggccagctgagcatatcgaggctgctcgtgaccgttcatgcgctgttgggagagcaccgagttggtcaaggcggagtcctggttgacataggcctgcggattcacccggccgcccagattgagatgaccgcttcctattcccatgttcccagtcggccggttgactctccgtccatctggtaggatatgcgccagtgcgcattttgcgccgaatttgcagtttccctaaaatcattgccccgttagcttccgatggcctcggataacacgccatgagaggaggacttcgaaacagttccgatttcatacctttgcaaaatacttgcacggagcgtaatcaatgccggcatcggtggagtgtaaaaacggacaggcgggacctgcctggcaggcaccctggcggaaaaatttgcaaggaacatgtttggtgtctgtatatatgatagcagagggttagtttcgcattcgggcgtcgctacaataatatgaatgaatcaagtcaagacttactcttattgctctggttcggcgggctgcgggcaacgtcaagtgccgatggattgcgagaatgtccgttctgggggttctggggtgccccagaggtagccggaagaggcgcacgacctctcatctctgaatgattggctcgacgagatggcggagcacgagaagacacctgcatagagacgtaggaggggttggagattgaagaggggaaagagagataggcccaggcggtggagacggcggggagatcaaataatagatggttcacgacaatacgaagaactgtgaagaagtgaagttaacgcggcgtattattagaataataataacatcattatgttatacgatctcaccacagccttgtctcatatgataatgttcatctgattacggttcgcctcatcccgcgttgcctccattccataccggcgaatcagatctcccatcggaaatagaatacacaccttaaaacctctagaatccccccggtagctctcacactaaacgtgtgcatgagtgtcaaatgatgtgactcgggtggggactaggtagagagatcaccactccgcgatgacctcttattggagcgttccttcaagccccaaagattcctgataacatttgtcagaattccagagcatggacgattggagagctttgaggctatgtcactcgtcattcgcaaaaacttacccagagctccgccgcagtcatgtcctccggaagtacctcagagcattggtcccagagatcgcgacagatccgacggcgcaggttggcatgtcgttgccaatatttccattctttttcgagtttttctcttttttctggtgatatttgaacggggtcgccctcgtgacgacttgccaagcgagcttggatcgtcgattcctcgctctcaagacggctgatgtcctgccggagttcggatattcggggctttgcgtgcagggctgctaacgctgctcgggccttcttttcgtttgcctgtacagttgaaatctcgtcttcgagcctttcaatatcacgctggagagctgcagctatctctggggttgtgatatccgagggatcttgcagagcatggtaaactgtctgtttgcctatacgtcacttggttagtatgtctttctgttcaagtatgtcagacttaccagaagctctcccttcgatctcgttcttctcgtgcaagtcccgaagaagctttgcggcttgcgctagaagcccatatattaggaaagcatagacacggtcatagaaccagtcttacttttggtcaccttgttgtggagatttgcagagacatcaatggcctagaaaatgcttggtcaactctctgttcctcaggctgtcatgaagagagagcgaaccgagtatggacgactgagccaggcgatgttagtcactatctcgagtatcaaacaacttattggagctaacatacttttgttggcctgaaaatccacccggtaagtcattgtgagcaaacatctgtcaaggtccagattctgtccagatactcacgaaggtattctcggatcattgaagcatctttgcagtcaaggtcagcaggtcaacaaggatttgatcaagagaatttctcaccattatctgcagatgcatctgtcttgggcttacgtggagccatggtgtgatgattaggaagatgtttgagattgggaagatgtttgaatgtactgggttggtacgagttggagttcacaccggtggacctcacgtgtgtgaagtgactacagtgacactacaattcgaagactgaactttcaatgacaataaattcacagtaaattcacaactactcctaattcatgcccaaacttacaacccgaatgataatatgtccagggaaaagaaacaaaaaagcttaaggcagatatgaaatgggtgcaaatgcagtcatgtggaaacaagaagccattgagaccattcgcctcccggacggcgaatactttttgaacccccgagattatagaaagtagagaaaatgcaagtggaagggagacagccaaacgtgcttggatagggaacagagcccggggtatcacatcacaatctgcaaaagtcagctttgagtcaagttcaatggctaaaaagtagggtttacatacgcaatcactgtctttcgccgcactaggaacacccatctcttcaaaggtcttgggtcccttgcttggtggcttggcgggcttcggctggggcgcggatgaagtcgacgatgcgactgagggggcgaccgagggcgcgatcgaggacgcgatcgagggcgtcggttgaggcgtggaggcacccgaaccgtgagaagatggccgagactccatacgtggaggaaacgagggcgaaccaggcggacgaggagataccagaccgggtgaggacattccggagtggccagcagtaggaggtctcataggcttgcgttcagccgagtcaagtcgaggtggtgggcgtcgcccacctggaggcggcattggtgcagaataaccaatatcgagacgaggagccccaccaggactgaccatgttactagcctgtgggcttgtaggtccaggaggagcgctgagaggtgctccagggacaggttggcggtagttcatgggcccgttaggtccataggacggattgtgagatctaggggggccttgggcaggtgggccaccatatcccgagggtgcattggttcgaagattgggaaggtttggattgacgccaaaagcagagcttgggcgattgtctgacagttgataactctgctggggctggggccggggacgagtagaggaaggacgatcggggtaaggagctccagatggtgggccgtcagacaaactcatcctcgagggatctggcatttggatattctctggggttgattccattgaattacctcgctgatgagcggtatatcgcgtcgacttgatgcgcgagactgcgattttctcatggtcctttctggacagagtctttgagcgcgagatactttcaatccgaccagatgcatccttgttaccactggcagcggccttggcgtaccaagagcgggcttcctttatatccactggtacaaagataccaacctcatagaagtaacccagagcaaattcggctgtcggaagaccactctgggccgcgcgttgagcatatgtaaatgctagctcgtcgttcttctcaaaaataccctcatgtccacacaggaaccatttgctgattgccatctcggcttcgggctcaccctgacgggctgccagtgcattgtagtgcagagacagcgcggggttgaaatcacagcccagttgacaaagttcatatgcagcacccatcttgacctgggccttggcgaacccgtgatatgccgccttttcgatatttacacgtgccatgttcagatcgaggggtaggaagctttccgggacgctcacttgagggagctctcgagccaagagcatgccgtataccttttctccattagaatgatttcgaagatagaaatttttacaaaactcacgtatgcgccttgaggtgcgttctggtcgcatgactgcgccgccagccggatgtagtccaacccagtgttgaaatcctggtgctgtccatgctggcccaaaagaatcatcattcccaggcgctgaaagtatgttgttagtttttccactatgtccagtctatctgataacccacatagtatgaggcagaatccgcccgcgcaacaccccgctggtaatgtttgatcgccttctcaggctcacccgagctctcaaattgcattccgatgcggtactcggcacgcgcatatcccttctcagcggctcgggagtatgatcggaatgcctccttgcgatcgacggggcagccaaatttgccgaactcgagccacatgcccttgataaattccgctttggggtgacgctgctcggcaagaaagccgacaatgttcatcgcgtcgacccttagccgccgctccacctgtggggtctgcgggcgtggcggttgggtcagagagaggcggacatcgttctgcgcggcaacctcgacaaaggcgagggcatccaaggcccatgcgagttgcatctccgggtctgtggtcgacagcacggccatccgcgcgcgctctaggttcgcctctctctgttcatcggtaggcgggacgttaggtggtgggttccgcaaaaccgggaacggtgagaagtttgggtgatccatgctatcataggtcgcggattgcgcgtaggaattgggatcatgagcttcatcgtgtggggattggacggcggacgaggtgcgttcgggataggtgttggcgcgttggtatggcggttgttgttgcccgcggcgggggtcagcgcggtattccaactcagcgatattgtcctgcatgttctcgggcacttctggcatcactctagggtgaattagtactcgtattttcggcattctcggcatttgcaggatttgcaaagatcgcagagatgacagtgatgacagaaatcgcggaaatcgcagatagatgtgaattcaaattgatacctttgaggagatggggatatgacctctggcatgtagaagtcatcttgcccccctggataccatgttgcacctaggtgctgctgaccaccctgtggtggtctgttcattgtgaaattgttagagaattgtccgatcccccttgtcaatagtaaaggtcgaatagtgtcaagagagagggggaaatgaaaagaggagttgaaagtgatttaagggaaaaaggtagacccccacccccgccaggtcaaacggatttgaagaagagttattattagtatattgatagtagtattggtagtattaataggatatatccttctacttctagtaatataatagcgccgacctgtataagctccattatgtacatattgtattcttcagcctcatcgatggatgaggtacataactgtaccggcggacgtagggacttccatctggtggggctctcttgggggccgctttaaggcggatgtaagctgactaagtcgggttcacctccgaggttgggtaaatctcagtccggaggctgagcgctaagccacgtgatatatcagtgaggctgatgaatcaacatagccccacagtgtctattttggtaagaatgatttttgatgagcagagtaatccagagactttctcagcaggaagagcttgttaatgatgtcaagggttgaaggatggaggcttggagtttcataatgttaatgtgtctatagaatcataactatatcacatctcatgagccttatgtatcacaccaaactcatatcccattacagtgaatccgacatctcattcttgataaccacagcactcttctcacagggctttgggtattgatcggacgctgcttccaacccctcaagcatcactgggtctgtgtgatccaatttaggatcctcaaaaagagcggcgagctcaacttcggttttacctttcgtttctgggaacacgaaatatatgatcaaagtcttgaaaaattagtactcgagatatggaaataatggtagttgaaatttcactcacgccgaggacaagcattcccaggtagaaaatatagtagtaatatccaatgctctccagtgcaatgggattaacatattgattgacggtaagtgctgcctgcgagatagccacttgaatacttaaacccttggctcgaattgcaaacggcagaagctccgtcggatagcaataaagaagtgggttatttgccagattaaaggccgcatcgtagaaaaaaagaaatacaacgacggcaaacgaggctcccttggatccatgttgggcatacatggccgagcatatagtcaatgggatgttgacgaggatcatgccgatgaatgagatcagccagagagttcgtctgccgattcggtccgctagtaaagcccctgctagggagaacagcaggttccatatctgcaatccaccgttgataccggtttgctgaggtgtagaggtgataccaatgctggtcaagatggggctgaagtagtatgcgattactccctggccgttccagagtgtcaagagggcaacagtagccaccagggcaattcgtttcctgtttgccggcgactggtagagaatacgccagctactttgaccactcttttgggcggccgcttcagcctccaacaaggtatgtatctcttccatctcatgtatcacaagaggcgagtgcatgttgccgttgctatgatactttgcaagcagtcgttgggcttcttccgggcggtgttttgcacaaagccatcgcggactttcggggagaccgcaaagaacggacatcatgacgagaagtgcgggaattccttgaatgagcgacggtatacgccatgaccagctggtagtcatatatcctgtgccaaacgttgtccatgccgcgatgatggagcctacgtaccaaagtacattgaactatagaagtctcaggtcagcagaatgtataaagagcttggatatattagtaaggggaccttaccaaagaagatattgtgccacgcgtcgccggatgagccagttcgaagagcagcgaggggccagcaacacatgtgaagctaattccaacgccaatcaaaaaccgaccaccaataaacataccagctgattgtgcagctgtttgaattacagttcccgaaaacgtcaggcttgctccaacaaacatggctactcgtcgtccgaggtagtctgctgtgggcgaggcaatcagagcaccaacaaagcccccaacgaaaacaatagttgttatgagtccgattctagatgagtccggatttcccatatctggtgagagctgcatgattagcttctatctcgaagggaatgtagaaaggatctacggacctttgacccagggcttcatggactggaaacttcccaccacactttcatcataaccagtggtcatttgcgatataagaatggtagcctgccatgctagtagcttgcgcataccaagatctttccaccatttgtcaaagcgatgagtttcgatttcatgaacgggggcagtcattttgggaggatgaggttgatctctggggttaacacagaggagggcatctgggagagccaaggagcccattgaacttatattttgccatgatcaatggtatctgagagtgcaagcagatagttcattgaccgttgtagatatcgatgttggtcaactcgcgcgaaactcgcgcgagtttcttatctgcggaggcgcggcagtttccgccacccactccgagggacatttccggatacaattagggcttaaataaagacgcaacataccgaagtctgctttcaagatgctttcaaggcgcttttaccaatcattgacattcccgaccgctcgatcctgtacctagtttcccacccataccatgccccatccaacgactaatcaagtcaccgtggacgattccagagttcatggagactggcgagacgaattgttccaaaatgggtacgttgtggtgaaaaacgctatctcacctgatcgatgtgaatactacatcgacaagatgtttgagtggttggaaagtttccctttcgggtttgacaggaacgatcgctcaacttggaccgaacagcatttacccacgcatatcaagggcggaatgtatcatggataccgtatccagcatgagaagtttatatgggaggctcgaacgtaagtcttcaattccatatccgacgatacacagctaatcgatttgaccagagaggacggagtaatcgaagccttcgcaaagctatggggaacagacaagcttctggtctctttcgatggagtgaacttcactcttccatctggtactactctgccacaaactaaaccttggccacacattgatcaaagcccactgcgacagggtatgcagtgtgtccagggtgttctcaacttcgcaccaaatggtcctcaagatgggggtcttctcgtcgtgaagggatctacaaagcttatgccggagtttttcaagactcactcgggtgaaattggcagagaaacatggggacctagcgattggtttggctttgacgagagtgaggtgaagtggttcgaggaaagaggctgcgagattcttaaggtgaatgctgaagccggagatcttattctttgggactctcgcactatgcacttcaattgcgtcccatcatctcagaatctacgtgccgttgtttgtgagttctcttctccgacccaagtggtctctctctgactgttcatagatgcgtgctatacaccagcatcctttgcaacgcctgatgtcttgcagaaaaagagtgaattcttcgaccagcgaattggaacggtaagttatcctttctcctgtctcttctgcataaaagggcagtttattaacttcttgaatagacacattggccccatgacaatctattcactgaaactagccacgcaaaccgcccagaagaggacgaaggggacttgaccaagcgtctttatgaggaacctgttgagacggacttggtgttaaagctggcagggaaaaagccttactagatgtttttagattacttgctcgcccatggctcatatcttccagatccagatagttacattcttcctgattcctctcaatcgatcaagtattttgacatggagccgaattttcttccatatcactagtctccttcatatgtgggtataagagaagagaaaagcgacgtaataagaattttcaaatcccctctagaatgcgaagcacccgaaaacgaacaaatccaaagcacacttagcccatcatacctatattattactcgtacaataactaatatctcgctaaatgacttccagcgaaggtctcgataaggataatctcggggtattcaaggtggggatgattagaccaatcagatcaagtcccccaaagggtcatagataaagaccgccaaggctgcatttgtgtcttccacatatcctcaatgacagcaagaaagagccaaagggcacccaatgcttgctctagttgtgctaaacgtcgggtgaggtgcgacaagcaggtcccatgtggaacttgtcttgcaagaggcctagaaactacgtgtgcaagagaagttgtcaacgtcaaaggccgagttaccaggtgagtcaagcaatccagtatataactagtgctaaaacagagacagtgcaaagcagagggtgccggttctatcttattttgaactccaacaagaaaacaatcgactaaaagctgagctattcaaatcaaaactacttacacagcggaaatcgacgtcttctacatatcctagacaggaaatttccgctgaagtgctcgaaaaccagacgaatctgcaacatggaaaaagcgattatcatcagcaggtgtggaatcgaacagacatctggatgccaagcaaagactgcagtgatattttattgcatcacggctttacctggacctcgtggatccattttgctgttcatctgcagacattcgagctagagcatgagtctgcttggataaccggggtattccttgatggcgatcctctctggctagctatatattttggcttcatagcagtgagcaatatttcctgtttttcttttattgtcgaggaacctaattgatcatagatgagtctgatgtttatggataaggatgaagctagaagagccggactacctctaggtttggctacccacgcgttttcccagtcaagttaagactcctctagtctaatgcatcctagaaaatacgtctgaacttgttcagaattggtacggcgcggcactatttttcctcaacgaggcggagtttctacgaaatccgaatttcaagacagtacagtccattgccatacttctcggattggccaaaaatgttggggactttgatcttcaaccagttcttcaggcgacaggaataaggataggccagattctaggaatggatcaggagcctcccatgatatccgacgaccctgttatgcaagagatcagtcgacgagtttggtggaccttggtcatctgtgaatggctgtccataccagcgcgtccgccttgcatccaccaagcagacttcaatgtcaggctgcctctggtcctctctgatgaagagttgacgacgagattgatcaatgagccgaatatggcaaccaaaatgccacgtccagtggattatcacaatgctatgatctttttagcaaagtcgaactatcactttcaaatccaaatgagggctatcgaaaatctggatggagataatcttctggaagaccttgttctgacaacggatgaagcgctagccaatatcatctcacagttgccatctcatcttctcgagatctccggaggactagccaaagagagagaacaatatccaccctgggtactgtggcaacaaaccacattatctctctcatttttgttctatcgaatgaaggtcaaccgagtcctacaacatcgatgggcctcctcttcggatgtccttcttgcaaggtcaaaagcaatctgcttagactcggccaacacgattgtgtcgatggtcaagcaacacaaagttgtcttggcacgccatcgtccatggtgagtctcaattcttcttctgcttttctgggtcctgttcactaaatattccacttcttcctccttatgatagggcaacaacctctgccctgttttccgctgccttgacccttgcagcagaggcaaagcgtcttgactcaaatgcagcagaggagtacattgacagagttcaaacttgtttttcattttttgagtatatcaaagatcacagcgctcttgcaacgcgagtcctaagtgaattgcgggtgttttgttttcatgattctgagtcaactagtgtctagtgattacagtgatattatggatcccattgcattgaaatttataaccagagagtgatgcagtcgattctttctagatggaagactcaactatatatatgtttagagtcatttcttatcggtacgtctttggctagtaatatcaaaggtgtaaatgctttaggtccttgggtaatgggtgatatgagcgaatgggaaatcgatccgatcagcatagctcatacgtgcctctgccagctttgataaagcagacgttgcatgtgacgagactagcgtgtcacattccatggaaccttagaaccttagaatatggaaaccttggctcggcttaaactcaatgggcgaatcagggcgttcagatgataattagtgggtcagaaaggggcatgcccagttgtacccagtactacggagtactcagtaagacaaaagcggcaaggcctgaaatccggtacctgcgtacaatacttccaaggctggtctctcagatttccaagatgtacctaacctcctccgtaccggtaattttaccttcaccgttttatttttatcttttccctttcctttggctattctcccgaggtcccttctaagttcttactggctgtcatctccaatggatttccaccatccctataagccatacgatatccaactacagtttatgcaggccttgtatgcctgcctggaagatagcaaggtcgctgtctttgaatcccccactggtaagctagacctcactgtgtttattgttgattgatctaacataatgttatgcaggcactggaaaatctttaagcttaatctgtggctctttgacttggcttcgggatcacaagcgaaaggccttccaggaaagtgttgatgcaacatgtgggtcccattgtgaaagatatgactgcatagcatctatctgacattccaggcgatgacgatgagcccgagtggatgatagaacatgccaaacgggaatctaggcgtgccattaccgaaaagagacaagaactcgaagcccgactggccaagattaggcaagaggaaggacgtttgaaacaggcccaggacagtgcagaccgaccccgtaaaaagcaggtatgcatatattcaccgattggtgcaaggtcactataccaactagaaaatagcgactggacgactcagcaccggaacttgtggacgatgacgaccaatttgttctcgatgactatgatagcgacacagacaatcagaaaaggcaaaatgactctgggaattccgacggcctgtctgcaagcactctagccttgttagaacgctttcaagggaaattctcaacacaaaagaaagagaaagaggatgacggagatgatgagattaagatctttttttgctcaagaacacattctcagctgagccagtttgccggtgaattgcgacgagtcacctttccatctagtttacctagcgacctcgatccagagagcaaagatgacctttccaaactggaagagcgcgtgaaacacctgtcgctagggtccagaaagaatctgtgcatcaatcccaaagtccgggccttggagaacaacaccgcaattaacgagaagtgcttggatttacagcaagccggcgtagcagccgacaagaagtgcccctttattccctccaaggatgacgaggctctggctcttgagttcagggaccatgctttggcgactgtgaaggacatcgaagacattgcccaggttgggaaaaagctcggaatatgtccctactatgcatctcgtccagttatcaaacacagcgaggttagtttcacccgggaacagatagaacgtcgtctctaactcaaaattagatcgtcacacttccatatcccttgttgctgcaaagatcagcccgcgaagccctcaatctctccgtcaaaggtcatattgttatcatcgatgaagcccacaacctcatggatgcaatagctggcattcattcggtggctgtctccctaagtcaactgcagactgcaattgggcagctgacaacatacgcccgtaagttcaagaacagactaaaagggaagaatcggaactatgttgcgcaagtcatccgcctggtgagctcaattgcggagcatatgaagtcgatcacccagcaaaaaggaccactagaaggctcggttcaagcctcagatctcatggctggaaagggagttgaccaaatcaacccttataaactctctagatatttgcaagagagcaagctcgcccggaaagttgacggctatctcgaattttcgcaacagccaaaacctggtcgatccaaagataaaacaacaatgccggttttatttcatattcaaagctttcttcttcctcttatgaacccctcggaagagggacggcctttctttttaaannnnnnnnnnnnnnnnnnnnnnnnnnnnnnnnnnnnnnnnnnnnnnnnnnnnnnnnnnnnnnnnnnnnnnnnnnnnnnnnnnnnnnnnnntcttccttttaggacccccggggaagggggacggcttttctttcagaaaagtcaagacgatgttttgttgaaatacatgcttcttgacccgacaaaccactttcgggaaattaccgaagatgctagggccgtcattttagctggtggtaccatgtctccggtgagtatagctcatatattctaacattgtagttttctaatgctctcaacagatgtcagattatgtgactcatttgttttcatatttacccccagaacgactggggacattcagctatggccacgtcattccaaaatccaatttagtcgcgcagtcattggctcaagggctgatgggaaacgaatttgattttacttatgaggcacggaattctgaaagaatggtatgtgcaaatttctgtacttggaaaaagtttcttattgacatataaactagatcaccgatcttgggcgtacgatagcaaccctctgtcaagtcattccggacggtgtcgtcgcgttttttcccagttatgactatctcagttatgttctgagtgtttggaagaagcccattcccaacgggaacggccaaagcactctcaatctactggaacggaagaagaaggttatgtacgactcacgcgaagcagtgacatctacagatgatttactgagggagtacactgaggccgttgagtcgggatccggggctttacttctctctatcgtgggcggcaagttgtcagaaggcattaatttctccgacaagctagggcgcggcgtctttatcatcggcctaccatttcccaatatccgcagcgctgtctggcaggccaaaatccagtacctcgaggaaaagacctacaaacaggcttctgggtccgagtcggaaaggaaagcaacgggcaaggcagcgggcagggaattctacgagaattcgtgcatgcgagcagtgaaccagtgcattggtcgagccatcaggcatgtaaacgactacgctgctattatcatgattgaccgccggtatgagtcgccgcggatccagcaaaaactgcctggttggattagaggaagcttggtcccagcacctcccacgcgggcggctcaaatgactgtgcaaagactttcaaaattcttcaccgaaaaaaggcgatagtggaatatgcactgtaatcgaatcattacaaataatgatacagcatcataatcttcgcatcaaatccgtgctcgtattggagatgtgccgtaaccctacattgtaaaagaccggcagaatgagaaggcggtgtatgtaatccgtgacataagttctgacaaagccagggctagggttccacgatcacgggacaagcgaatttgttagcgcacactctaagcctggatttcaacatcctgtagacggaacgatcccttcaacgccaaacatcaacggtcttgtcgaaacacccccgccgacaagatgcctacccgtttctctaacacccggaagcagtgagtcgacaccctttcctgtgccgtctgaatcgaattcttttctcgtcgatcgcgaccagaagaaccaaattcgtcataccccagtcgcaatatcacatcaacatatcactaacctgtctttctctcgcagccgcggccatgtgtctgccggttacggtcgtgtcggcaagcaccgcaagtcccccggtggtcgcggtatggccggtggtcaacaccaccaccgtaccaacatcgacaagttccaccctggttacttcggtaaggttggtatgcgttacttccacaagaccaaccagcaattctggaagcccactatcaacgtcgataaggtacgttacatctacattttgcgagtctattcgagatgaaggagaagaagttgtggattggtctggagttggagcaccggtgcgcaaatggcgacaatatgcagaagagaaaggaggccaatcgacaactattcgaaggatttgcggaattcgattgaaatggacaattatcgctgaccgcgactttcttctacagctctggtccctcgttcccgccgagcagcgtgacgcctacctgagcggccagaagaccgatgtcgcccccgtcatcgacctcctgcccctcggctactccaaggttcttggaaagggccgtctcccccagatccccgtcgtcgtccgtgcccgctacgtcagccgtgacgccgaggagaagatcaaggccgccggtggtgttgttgagctcgtcgcataagcgttgattcgtcgagatatttctggagaaggcgggtgaataggggcaatttgaagccctagctgtgttcgttcgccagcatggaggacgatcggaactcaaaatgagatctgcccgaaccgaaactaagtcggttcaagcggtcgaaaataaaaagggtttttttgtatgcaatcagcatagcatatggcctccgaatgcccttacgatttcatcagtgtgttaaacaaataccataaggaggatttttttcaaatgtttatgatgactcccgggcagagtgttggttctgaattattgcgccacgctcatgtaggatgaccgaggctgtcttggggcatgaaaggcttcgaatcccgaacaggttcgctgttaaagctccatcgtcgtagatttgtctaccaatctgtccgattacaattgcagaacctacgccagtgacaggtcatgtctattcacatctgatctcattctatgttgtatacatcgaggtattcaccatggcctagtgctctcagatcttcgactctcgcaccgaacctcgtcgacccccctgatcgggacccacggccaacgtctcactgataaaccgaacagcctcgtcagccatcttagcagtgacctcatgggctgccgattcgtcaatgatatcttcaaagtgcaccccgccatcaccgaaccacccatcggatgagatactctgcttgagccagttgaggaacagttctccacggtgatagggaacaagcttgtccttggcgccagacagattcaaaatacgcttgccagccaaggcatgagtcaaaatcggccgcagcaccttctgctcgctctctgaaggctgaggcaacggaccttcgcgcaaaggaccagtcaatggcccgcaatccacatgcttcagcatcatactggcaggatcatatcggctgacggtctctaggaaagaagtcggcaaggcttccgagccaaggacgtcggcgccaggtggatcactcttagtccatgatggcagcttcgacagccgtgcgcggtctgccatcagattgatatagtccgggcagccgatgatgacaactccggcggtgactcgaggctcgtgcagtagacagctccatgctgcgtgtcctcccagcgagactcctagaactagattctgggtgatcttgtgctcgccgctggggaatatgtaggagggaaggtagtccatgagcactgatgtatctcttgcagtgccctctagttataattagaataccatattcttattttacacatgcattcactcacggaagatggagaacatatcctgggcatgtctggggttcccctttttccaagattcatttccgagagggtcgaccagccgggtaccatggtttctctggtcgaacgagacggcaatcaggcccttggccgtaggggtgtcctggtttctcgtgttccagtcggtaatggcggaattggcaatgctagtcatgcgctcttgggtggctaatctggggtgaagaagccagagacatgcgacctccgaggcctctttgcggagctcttccagtccgaagaccgttactgagataccagcaattgtatagaccctttcagagatggcggctgccacgctgcctacatcactcacggatttcaatggatcagtcattgttgaacagagatatgaaagatgttgaagagaggtgggctgaatagcggggagataactcgggtatactacgaaaagccgaggccgttggtttagagcgcatgtttccgagactacgaggatttgttatgttttagatgttttctagttatgttgtctattgcctatacctcgtctcctttattgcaagttgatcctctcctttttgtatatttgattccacagtgttactccaaggtccccaactaaagccacatatacggccacttttgtttgctattaaaggacaaacccctttgaattcagtcagtctaattcaatattcccattttatacgcttcatatgtcctattatataccaaatactccatatatactgttgtagagcccatgtccgttgatcataacacgcctcgacgtccaatgccccttttccagaccgcccactcttctccagtcggagagacagctgggcactccactgtaaaccaattatcgatgctcctttaaatgtcaacacacgttctttatcctggaatttcttgtttatttcttgttcttttaatatgatgactacctagtcagtttcgacagtgtatgtacgtgaacgtggtagaatccctgtgaactgcaactgataatcgccttgcattagctccaatcatgtcggcctcgtcagttcacaaggacgtggaaactggctcactgaggatcgacacaaagaagcaagagccccctttggcttcaaacaaatcaaaactggcaagcccgctgccttctcccaccgaatccaagaaaccagcatcgatcaagcaggtccaacccacgacggacggccatgaaacagatgcaacaataggcgacaaggaaaatacacatccatcatccttgaaccagggctcaccaagaggaaggccatccctgggcactcaaccgccaaaccagtcagctgaggaccaacaatggcgctatcaacgccagtcgtctaaacccagaatgtctcctccatcccgtcccccaagtgtacatttcagagatacagacaccgaggctcctgacgcgtcccattcccggccgccatcgcgacccgtctctcgaccagcctcccaacacggcgacgatgatgagcagggtcccaaaggaaaacagtcgttgttcggcaaactcaagtcactcgctaatgcacccaaccttgcaccacactcacgatctgccagcggcgcgagtacggacttccgcccaggtccaagcgatatagctaccccggggtcggaaaggggagaattccgcttcccagaggccctggaagaagagggtagcgagatcgatgccgacgcggaagagagtggtggcgagcaacccgatcctcgtgaaaagagaaaactgcaacgccggcgaaagcaacgggaggaagaggctggccccaacaccgcccctacaacacctaaaacagcgcgcagaccatcattccacttctcatcctccttcgctcctttcgagaattatcgtactaatctgttccctcgaagagcaagcactacagacttcacgcctcaacaacgcgaaggtgtttcggaagatgaaggtcgtcaaaggctcagccgacggatgaggagtcgcccatgggcaaatactcgggttggcagctataatgaccacccagataccaatccggatgaacaacgcccgagcaacttgaggcgatttaccgggcttgctggaccatctggaaacgatgaaagcctaacggcgagctggagacgccatcgagccgagcgaggcaccagtgccagtgctcaacgatggaaacaaatcaaagcaggtctgaaacttattgggcagcgacgaaagccagagaatacagtggacaataaaaaatccgcagagttacttgctgaactcgcttcggccgtgcctgctgcgcttatactggccagcgcattccaacgagatgagcacggcagtagaaagatcccgattcttttggagcaattgaaggttcgtgttacggacagccggattgattcccactccggtgatcgtcatctggtcttccgaatcgaaatggagtatggaagtggcatgactcgcatgaaatggatcatcttccgcacgctaagagactttgccaatctgcatctcaagtataagcttcatctgggaactcagaagtacattcaactacgcacgagtgagaacagcccgagtctcccccgattccctagaagtgccttcccctacatgcgaggtgtgcgaggccttgaaagtgaatttgaggatgaagatgaagagggtggttatgagactggcgccgagggaatgagtggaacggagaggcctccgatgaagaaaaagcagaatcaacaagcacaccagcgtcgagtctctggtccgcttcctcgcagaaagtccagcctcaccaatcaagaaggagacacagccgcgggaccttcgtccactaacgaaggtgtctcgggagtcaggaaagaaacataccccgagaagcagcgaaagaagcttgagctctatctgcaaaagatgattaggttcctaatctttagggctgatagtaatcgcctgtgcaaatttttggaactgtccgctctcggtgtccggctggccgcagaaggcagttaccacggcaaagaaggattcttaataatccagtcctccaagggtctcgatttccgaaaggcgctcaccccggctctagtcaagaagcgccattcgcccaaatggtttttggtcaggcacagctatgtagtctgcgtggactcccccgaggagatgaatatttatgatgtcttcttggtggatgcctggttcaaggttcagacaccgaagcttagtcttcgcaagcaaaatccaagggatattgccaagtctgcaaagcagtctgcgagacaccctcagcaccacactctccggcttgagaactccgaacgcaagctcaaactgctggcccggaatgagcgtcaactccaacagtttgaagactcgatccgcttcatgagtgccaatactccgtggatgcagcccaaccgctttgacagtttcgcacctgtgcgacaaaactgctttgcacagtggctggttgatgcaagagatcacatgtgggttgtctcacgagcgatcaaccaggcaaaggatgtcatttatatccatgactggtggctgagtccagagctttatatgcgtcggcctgctgccatcagccagaaatggcgattggaccgtctcctgcaacagaaagctcgggagggcgtcaaagtcttcgtgatcatgtatcgtaatatcaactccgctatccccattgactcggagtattccaagttctctctccttgatctccaccccaacatcttcgttcagcgatcaccaaatcagttccgacaaaacactttcttctgggctcatcacgagaagctttgtcttattgaccacaccatcgcatttgttggaggtattgatctgtgctttgggcgatgggatactcctcaacatctgttgaccgatgacaagcctaccggctttgaaaccactgatggtcccaaagatgcagatcaatgtcaactctggccgggcaaggactactccaatcctagaattcaagatttctatgacctggataagccgtatgaggagatgtatgatcgcaatgttgtaccccggatgccgtggcatgacatttctatgcatgtcgtgggccagcctgctcgagatcttactcgtcatttcgtgcaacgctggaattacattcttcgccagcgaaagcccacgcggccgacgcccttcctcttgccgccacccgatttcaatccagcagatttggaagccttgggtcttgatggaacttgcgaagtacaaattctccgttctagcagtatgtggtcgacaggaactcccgatgtcgttgagcacagcatcatgaacgcctatgtcaagttgattgaagaatccgagcatttcgtctacatcgagaatcagttcttcatcagcacctgtgagattgagggccgaaaaatcgagaaccttattggagatgccctagttgaacgtattgtccgagctgccaaaaatgaggaagcctggcgtgccgtcattgtcatcccactgatgccaggattccagaacaccgtggacagtgaaggtggaaccagtgttcgccttatcatgcagtgtcaataccgcagtatctgccgtggagagacatccatcttcggccgtcttcgtgctcttggaattgagccagaggattatatccaattctacagtctgcgaacttggggcaagattggaccgcaaaaggcactggtgaccgagcaactctatattcacgctaaatgcatggttgttgacgaccgtgctgctatcattggatcggcaaacatcaacgaacgatccatgttaggttcgcgtgattcagaggttgcctctgtagtgcgggataccgatatgatgatgtcgagcatgaatggcaagccataccttgttggtagattcccacatactttgcgtatgcgtctgatgagagaacatctcggaattgacgtcgacgaactcatggaacatgactttgctactgaagaagagctacggaagatccaggtcgctgaggggagtgagcacccagttgacaaccaagaacgaagaaattcggcgtcctcggccgtcgaacgacaagatgagagggatatggtcgaacgtcggcatcgtgtccaggatgagtttctttctcgctccgaggaaatgtatagcttcaaccacgatgtagattgggagcagggttgtaaccctaacctcaaatcgaaccgcaagctcactgccgaccctcgcgtcactgaaaatcctgatcacagaaaagacgtggaaggggatggcgccgatcatctgtcagctgctgctcaggctggattaacagtcggtcgtgattcggagatggagcccaatggaagagaagccctgctttcagccatcgctcctgaggggaagggcactgttgagcgaccgagatcatcgcagcaaaagccaccttcaacaccctccaccccgaaggaccgcagacctgggtcatcgagtgagaccaatccaatccccgagaccaatgcgactacaccgtcacaaggctatggacttaatggagcgtcgagccgcgagtccgagactagcggtaccggttcgaacacggctaaagaagaaaatgaacactccaaacaccaccatccgtctgttccggatcccaagcgtatcttcatcgacaacgactgcatgagggacccgatcatcgatggcttctacctggacacatggcaagctgtggccgagaagaacactaaaatttaccgatctgttttccgctgcatgcccgatagcgaggtgaagaactggaaggaatacaaggagtatgccacctatggcgagcgctttgcagagatgcagagccaacagggcaacaagccagcccaacctcaacaacctcaacaaaaacaaaatggctcttctccagccggtcctacggttagctctccgatgtcgatcgcttctcagatgtctttcatcactccaaaggccgaaggatcgcaggcagacccgaagagcccccagacaattaacgagaaggtcgtaactgggaatgacgctggtcgtccacagtctgagcagttagcgaagcaggagacgttatcatctatcgatgagaaggccgcactcaagacggtttcggatccgaacctgttggccagtgttccgaacgggaacgggaccagcgacgacaatagtttcgtcgtcggtgatgatatcgagaaggcacgaacaacctcgcctcatgtcgattactctgaagccgtgaacctgaatctgaactcgagccattctcggagacgaagacgcagagctacaacaattggctcaaagcgtgacccccatggcacagatgagtatttggacaagggccgtgcagaggacctccttaaccatactcaaggccatctcatcatgtggccttatgactggtatgtctcaacaacgcttccattggatctcaggatatccactgaccaattctatttacaggctcgagaaagaggagcaaggtggaaactggctctatgctttggatcagatttctcctctggagatctagtaagttgtctctccttgttgctttccgaacggaatattaacggatatatagcaactaatctctaattgcacttgacggcgtcttgttcgtgcttgtctacttggtgtctgtgttggaattcgcgagcgccgctatagcgattgatgcattttcatcttcttgggccttcttgggtctttgcctagtcatccttcggagttttcatgcatcacggcgttctctatgttacccctacctaagtagcgcaataagtaatcatcccgtttcgaatacggagatagtatattatcccgccaaggtcctgtgtggtgtgtaatagacgtactatttcaacggttactgatgaaacggcttgtactttagtagaataatgctaaacagcagaagaaaattgaattcatgattatatatctatgaagaagtaggctcttccgcaacgtagtgcaggtaagctcccagcagcttggttccctcaatgtagtttctcttgtcaagcttctcgttgacagagtgggcagcatcggtcgagcttcccatggggagaagcaaaacgttcttgccggtagcttgctcgaaggtcaatgtgacagggatactatcaatggttagctgcgggactatttcatttatgggaaaagaagaatctcaccttccaccctcgcgagtcatatcaggctcgactccgaagacctgctgaacagccttgctggcagccgagaagttccagtgcttggggctggcgacccaccacttgccgtcgtgctgcagccaaacatccaaagtgttcttggtgttcagcttggcgaactcggccttcacatagtcgatgaccagcttggtcacatcttcgctctccatattgggcacggtacgaatagagaatttaccaatcaccttggcaggaatgacggtcttagcaccgggggccgagtaagcaccctcgataccgtggatggacagagagggataacgccatctggccatcagggtacgctccttggtggggtggatacctgtctcagcacccaacgactcgtggaggttgtccatagtgtagctgatctttccatagagagtcttctcctcctcagtcaagggagccaccagatccatgatacccggaatcaagatgttaccctgggcatcaaccagcttggacagaacgttgaccagatcagtcatgggctcgtgggcagaaccgccaaagacaccgctgtgcagatcttgagcggggcccgaaatgctgatggagtagtagttgcagccacgcagaccataggtgagacagggcttctcggtgccgagccagtagttgtcagagatacaaacggcatccgtgtccttgaagtacttcttactctcgtccttgatgaagtcatccaggccctcggatccatactcctccattccctcgaagcagcacagcaagttgacggggaattcgatgccagccttgcggtgggcatcgatgacgttaagccaacccaaaacgggacccttgtcatcggtagagccacggccgtacatccgatccttctcgtcaatagtcaactcaaagggctcggtagcccagccgtcttccttcagagccggttgcacatcgtagtgtccgtagaccagaatagttcgcttgttcttatcgttaccgtatctcgcaaccaccacgggtggcagctcgaggtgctctttgccaggctgcttgcccaatggtcgttgctcaacctcggctccaagagctgtgagctcatcggcaaggaattgacccatctagaaaagattagaccctggatttggatgtctgctgggaaactcacgcggaacacatccggtcggttctcatcttgcgccgagatcgatgggatcgcaaccgccttccgtagaccttgaccaaaaatcagcgaggaccttgcgagaaaccagtattacctacgatcgatgaaatcgttggacgaggcgtcgacccttgtgactgttagttgacgtctctctttcaaagattagcatacttactgcttgaaaaagggctctagctggggagccattttggaatcactgatatagccgtagaagaagcggcgagaggagagaggcgaacgaacagctggagaaaatcgagaagaaaaaggagcgagtttgaatgaaacgcgacggaggggaaagaggggcattgccgtctttgccctttggtaaccggagagagtctagaggtgacttcttatcacgtaattttctattggccctatcacagcgatgtggtcagcggacgggttctaggcgactgagacatggactttggcatattttaggcaaaagatacagtcgagacattagaattcccccgttgatccttatttctatatagctcttgataaagtagaagatttggtatggaatacataaacaatgctacaaataagctagaatacatggatttttctttacaaagccacccccccccccgaagtatcatgctgccactatgcatctcgtccccaggcctcgcgccgcagttgacggtcctctctggccatgcggcgcttgggtccccatcgcgattgcacggcctccaagatccgggcctggatctctctcttctctgggcttgcctggcaaaccatggcaataaaaacgggcgagcattcaaaccgtttggcaagcttgtttcggctccaggtcatgggatcgttcatgcggagtttgcggatttcttcaatatccgaaggggtgaggtggtatttcctttcgggcacggacttgtagacaccgggaagatcgtcggcattgggggtcgcagtggaagagaggattgatgctttccgaacatcatcggctggcaggaatttggatggggtgtggtaggcatttggagcactcgatggcgggttgtggataatgtgatcgtgacccaggttagacgggtcaaatgaggagtctggcttcacacgtagtcgctgcttggttcgtcggtatgaagattggtttcgtcggaagcctaaagccagcgaatccgacaaggagggaataaggaatggcaatgtgagaaatggccgcttcgtcgcggcaatgaaggtcgccattgcttctggtcaatgggggggattgatcagaaactaaaatgatggaagagaaggggttagtaagtctgcatagatagtggttgcaatgattcaaccaacctaaacggaagagtgaatttgggggtggaaggactggacgtgttggcgtctcttgcgctcgaacccgaacttttcccctggtctcgtgaccctgatctgggtgtatttgcaataccgtattgaaatatacgtatgtatccggtacctgataggcctttgttgtgagtgcctttccaaagtaccgaatacaacttatctccgtccttacgtactgccccaagtaggtaataatcctccccgtttgggcccgttggggcttgtcacctggtctactccagttacgatgtctcacagatgtcatcaagacttttgctaactcccatatacccatatactctactttattgattatgtccagattttgttagttcatcttatcgaaatgtcggatatcgaaatgtcgagatttgcagcccagacagagaagccaaacgaggctgaagcgagtacacgagcgaagcccactgctctcacatgggacaatcaaagcgacaaaggttgcatatcgcctgtgaggtcattcgaaggcctgcgaacaccaaatcatgattcgcccaagtacatgcgacacccctcgtcgcctgaaagctcatcctatctgccgtctcgtatacattcccccgcctctcagatattcgaacgagacgtggaagatatagtgccagcgcaggcgtcgccttcgatccctacgcatattcgaaccgataactatattccaccggtcctagaagcatcctcggccgcgatcacagatgaccacctcgatccagattcggtcgagattgtcacacatagcctacatcagccagcaggtggtccatcgggagagcagtcaatgtcgtcttccagcattgatcatctcttgggccagctcgatggagatgaactcacgtccagttatggcgcactggacacggcggacgtacgtcggctgagctttatttcctttgccgacgttgtcaacgccgagcatgcagaaacaaatgaagctcatgctggcttaatatctcgggggcgcctagcagatttcaatcaatctccgtctccattgcgctctccatcttcttcgcgtggactcggcacttcgccgccaacaagccgtgcgacttccttcagagggcttgatatgtctcctactcggttccctacttctagtgttgcccaaagcccaatctcgtccagttttgggggcgacctcaatatagagaccatgcgacaggctttgagaaaaaccgctagtggagacctgggcgtcacaagccgggccgtgagtaccataggggatgacctgctggatcgtaccatttagcagattaaagtgcttttgtttggcgtttggacagtgaaaggctcggagcaggatctctttttttttcatggtacagtgtgataatctacggtctgctttatatgatatataccgcaatctacggatctggatattccagaacctgaaaagtccaagttcttgtgtaatgcacaggccaactttgattgaattggggtagactatacacttgcctgcccaactttttgcactgcgtccaaggcccgttgtacccgggcgcgcaggtcggctgcatcttctaatccaacactgattctcactagatccggatcgacatcgaaggttctcgcctgatgcatgttagtcatggcctggtcaacattcgcgtggtgtacttacccaatctaattcgccgtaatgggccaggaggacgtatggagagctgaaaagttagtaaaacccaagacagagggcttgcgtactcacctcaatgtaaaattggtcccaaggctgggtcccttgaaaacctcgatggtgtcaaaaaaggcaatcgcctcggctgtggtgtggaatgtcacagagaagagaccaccataaccaccattggcattgcggagactatcatatagtggtttcgaggggctgtatttcgggtagtaaacatctttcactgtgaaattgtcagtatagctctcactccaggtaaatgcatgcttacctaggggggactccttcagcatcgctgtaatgtcctcagtggtagcattgatctgttcaatgcgagcaataaaatcacggctgtttctctccaggaacacgacatcctcagcccagtagatatcttcgtagtcctggttatatgtctccttgatggccgcataatacggcgcttgagggttgagcacagcacttcctcccatgacgttgctatctccgctgaaaatcttggtcaagctgctgacaacgatgtcggccaagtgcaaaacgttgatgtttataaagttgctgatagtttcgtcgaccaccaccgcaaagccatattggtctgccaaagcgcgaatccgtttgaggtccggtgttttgagaagagggttacctggtacttcggtgaaaagcccaaggaaacgctcaccagccttcagtcgagattccagatcatccagatcttccgacgagccgtgaccatagaagacgcagcctggtccccacttttggagaatcttcaatgtatccgtgtaagggaacccgaaacaaattgagggcaattcgcctctagtagccagtaaggtctgatgagcgttgaagatagcgctcatacccgcagggtaaagatagacatcctcctcggagataccggcgactcggccttctgatgaagctgtctttaaggcttctggcagttcagcattggcagtcaagacacccgcaatacgtttgcgaacagccagcttggcctggttggcgagagaagtgctcagatttcggccaaaccgctcctcaataaactgaccatagtctcggccgccgtcttcggtgtttgattcgggaggagattctccaacagagccctttctccctttactgataccttggtatctgcggggtcccttacaaggacgctgggagactgactccgcagtcgcaaggcccttgtcttccaccaagaacccgtcctccaatgctccaaggcagaactcacctcgtcgactggagatgccattgcccgagtgttgccatacctgcttggtaatggaggcgtattcttttgggtaaatgacacacgacaaggaagatgtcactgtcgatccggattcggtatgcggggatgggacgaagttgacaatccgtactttgtatgcctgatctgcagggattttgctaagcaaaaaagagtgacagatgcgcgctgacttgactgaggcgaatagggttgcagattcgaggttggggtcaccgactcggcgaacaatctcctgcgcgagcttttgaataataggatggacgaagaatcggggataaccgcattgcatcttgtctatcacccaagcttctccttcttcgtagccgatgctttccctccatgatggaagcgatacactgacggccttgtaaatgttagaagagtcatggaggggttgcggggagttagccatacatggtcagtgtttggaggcacaggtcctcccaaagcctgcaacattttcaattgaaaatagaaaccaggtggaatttatgatctattgcagataattgctctagaataatagagagagggaaaaaaaaagactgtaaggtaaatgatgcgattcctccactcagcgacttcggcgatgctccggtacctgataaattacgagtgagtcagccgtacggtaactatttaccagatacaataccgttatcgccaaaaaaaaatctcgagggcctctactgacaactgctacgctcacgaaatgtcggaccacacatccaagcgcagaaagctcagtccttccccggagaatgctgttactagcgcttcgacgaaaaagacatcgaaagtgaccgagaagcgaaacccggctcgaggcaaagatgagcgctccgcagagcttgcaatggccagcggcttttacaagtccagtttcttcaagctgcaaatggacgagctgctggcgggattgagacctaactacagcaagcaagtctcaaaggttcaggatacactgcagcagatcaaaaccgctattgaaggcctgcccgaaaagtctccacaatctgtccccgatgccgagaaggagctacgtgcttctggtctggtggtcccatggcctgagcctcgaccgagcaaggatgtcaagtacagtatggcatacgcaaagccagcgaacatcaacgtggtaggtagctttgcgctgaagataggcgctcgcaatttggcgtcgcgcccaattgatctggcaatcactatgccaagttcgctcttccaggagaaggactatgtcaacttcagatacttccacaagcgggcctactatatcgcgtgtgtggccgctggggttcaagaaaccgcgaacaccctcgggtttgatatcaaatttggtcctcaggatggagacagtctccgacctattatcttgttggaaccacgtcaagccgaatcttccaggcctacaatccggattctgaccgcaatcgatcctacgttgttcccaatcacaaggacgctcccactcaaaagcaatatccgacaggcctccaataactcggagatcggcgaaccgacctcgtattacaatgccagcctccggtccgatgccacagtttctctctatcacaagtctgtttactcggcctccaagaagtgcgattctttcagcgacgcatgcattcttggccgcacttggctgcaacaaagaggcttccatacccccttccagaatggaggctttggtggtttcgaatggactgtactcctgtctttgctgtttgagggcggtggtccaactggacaaccggtcctgctaccatcatacagctgctatcaaattttcaaagccactattcagtttttggccggcagggatttaaccactcctctattcttcggccatgaggtcccagttccttccggagtacctgttgtctttgatggccgcagagggttgaacatactttacaaaatgacgccttggtcatacacaacactgcgtcacgaagccgccatcaccctaaaaatgctcaacgagtcacgagaggacaactttgataaggttttcattctcaaggttgacgagccagtcctcagatttgaccgcttgatctcattccccaagtcattcaatggagacacactccgcgctcttcacgaacagaatgctttgtataatgttctttcccgggctctgggagacagagtcaaacttgtctctattgtgggccacgccattgattcgtggtcggtcaaatccaagcagcccaaacggtcgagtcagggtgtgtccgtgggactgttgctgaacgccgaaaacgtcggacgaattgtcgaccacggccctgctgcagaagaaaaagaagagtctgcttccttccaggctttctggggtgaaaaatcggagcttcgacgattcaaggatggcagcatcctagagagtcttgtgtggtctgatgagtcggagacgtctatcatctatcagattttggagtatatcctccaacggcacttcaaaatcaccaccgatgaatttgcatttgttggtgatgaatatgacgagctcctcaaagagcatggcgatggcattctggcatactccagccctgctttccagtcaatcgacaatgccttcaaggatctcgagaaatccattcgcggtatggacgaggtgccactggaggtacgtcatttggccccggccagttcgcttcttcgttatacctccctcagaccaacgggacccacggacgttgttcttcagtttgaaagctcctcgcgttggcctgatgactttgctgctatccaaatgaccaaggttgcattccttttgaagattggagactctctggaatcttcaggtgcagcctcatcttgccgtgtgggcctcgaaaatgaatcgagcaaggtgatcaacaatgcttatttggaaattccccattcctctggtgtgttgttccgattgagaattcaccacgaacgtgaacaaatcctactcgagcgcaatctcaaggaccgaaatctgagtccccgggagcgagaagaggccgcctatgctctcttcgcctacaagaaaacctttgtccagactccgcgcttgacacaggcactccgaagcctctgcacgcgctttccactgttgtcgcccaccattcgtcttaccaaacaatggtttaattctcacctgttcactgcccaggtcagcgaagagttggttgaattgctggtaattcgcaccttcacccaacctaacccttgggaatgtccctcgtctgtcatgaccggattcctgagaactctccactccctctctcggtgggactggcagcaggagccgttcattgttgacctgggaggtgatctggccccacaagtgacggcaaatatccgcactcgcttcacagcttggcgcagcatcgaccctgcgatgaacactctggctcttttcgtcgcctctgacctcgacaccgaaggagtgacctggacccaatatgagatgccctccaaggttgtggctgctcgaatgtccagcctgaccaaagcagcagtaagcctgttacggagcaaaacccatgatatggaagtttccgagctttttgatacctcgcttgctccctatgactttgtcatccatcttcgcccaaagctgtttagccgttcctcgacacccaaattcaagaacttggccgaaccccgtgccggaatgatgcagaccatcaagtcgtttgtctgtgatgtgcaagcctgttacggccagagcattctgctcttccacggagacgatcgttgtgcagtgattgctggcctttggaacccgcagactctgaagtcgcgaacctggaatctgaagacggcgtactcaactgccccaggtgatactgagggtgaggttgtaatcaaccagactgctattctgaacgagatcgcgcggctgggcaatgggctcatcgaaaacattaaacttcattcagaataggtcttgtcttgattcaattggtgtacattaccctacaaaatagttcgagcatatgtagcattctaacgaattccgtttttcttcaacttatgaactcttagcctcgagtatcatagtagatgatcctctaaataccctaatactcttagtgctagacattcccagacatcatcttgatatcgatgcctaaggtgtcaacaattgataacattgtgcaaccatcagcctttcatcttctctcatcaacacaacaatggccaatataacacggggccagcgagcgctccacgctcaattaagatcgtggaatcactcttgtatccaccctcgcccccaattccagttgctgcccatccgcgcgcaatcccagctcttctcaacctcctccagtcagcaatctcgccgaccctccccgtcacctcctaccacaaccaccgtctcaactccctccaaatctgaaatcaatgccccaatcagcacccaccccgccacgctcacaaccccatcccccctaagcccctccgcaggcgcagcggacaaattaaaacgccttgtcggaatcggtcgtgcgtacctcaccttctacaaaacaggcctgaagaatgtctaccacaattaccgtgcctcgctccctctacggagaaaaataggtctacccgcctatatccctatatccccacacaacatccaccaccgtagcgcgccatcaataacagaagaatccaagctcggccgcgcgcagttccagctcgtccgccgctcagcccgcgatgtccgccgcatgatccccttcacgatgatcctgatcgtctgcggggaactcacgccgcttatcgttccgtttttcggctctgctattacgcccgcgacgtgtcgtgtgccctcgcaggtggagaaggagcgcggtgttgctacggtacgcaaactcgcggcgctagatgcgtttgttgcggagaataaggatcgctcggtgcatttgctcaaggcgggcagtgcggagcagttggctttgcttgctaagtgttttgcggatcctgtctgggtcgccggtgcgagctctgcggatgtgttgcgtgcttgtgctgtttttggtctggttaagcatcataataggactgcgggtgaggcgcttgctggtttgatctaccggcctcggctggcgaagcatgtcgagtacctggctaatgatgatgggatgattcgtggtggaggggtttcggctatgaatgctactgaggtgcggattgccgttgaggagcgtggtggtgtggacgtcacttctggtgttcaggaccggaaacgcgtggagttggagaggcgctggttggagcagtggctggctgttcgtggaaaaagtcccaaggccaagaagctgtagtttcttggactgatacactggaggtcctttctcgggggttttttgtaatatatatatccaacatttcgactcataaaagggctgtttttcgtccagctttgctatcattactagccgcaatactagctagcctcggagtgcaatctcaaactgtatataagaagacatgtacggaaggaaaatccaaatgtccaagcgctcaaaagtagcatgtgtcaatttcgacagtcaaataaatggaagggtatcaagaaaccagcctttctgatggagaaggcaatcaattgaaaaaaaaaaaccccaagtttatatactcaccatcagtccactgtaattgaagaagccgcagcctgcgcctgcgcctggctacggacttgcttcgcccaccgcagaccacagctattgcaaagatcccggtttccactcggaccacgccgccactcgggggtgttctttgtgttgcacatggcgcaaaacttctcgatcgcattagcgccttgcttgcgcttacgcttcctgcggcgagccagcagacgttgcagttcatcggccagagtgcggttctgcttctctagctcgcgcagctcgatttgccagctcgatccgcgcgtgggattgagctctgtaaagaaggttgctgggtcggtagagggagaaatgctgcggttgccactgggcagaccgttgaggccgatcaggttcgctagatcgggcatgcgttgaccaagggcaccgtactgctggggcggggtggggttatcgacggtaagtgttgtgttgcgtgcagtaccggtaagcgtagcgagactgttgtcttcggcggctgagatggcggtggcggatggaggagaggctcgagcgaatcgtatctgggcgacgaggaaggtcggttttatccccttcggtgtatcgccggtgtacaatgtggtatgtgctgaaagggcatggcctttcttatgccatattttgtgtttgaatgagggtggttcattcgtttccttgtcgctacctgtaacggtggataggccagctccttgtccaccacaggcagcctccagggcttgtgtgatcgtggcattgccaccagtctcaggctccataatctcttgtatgcctttaccaatcaaatcgtcaggcgagcggccgagcaccggcttcaccttggtagtaacgaacagaatcacaccagacaaagaaatcttggcccaaatgtcattctcggccagcgcggcggatgagcccaggcgggcaatctgatccaaggtgtagacgggtcgtgggcggccggtcatgacaaggtacctccggccctgattcggatcgatatgccaggcgccgtgactctcgaaccacatatatccttggtgcttttgtctgatacgatacacgacactcactggagcggttgtcgtgctccctcgcaagtcacgtattacaggaccaatatcactgggatggcagatggcggacagggtcttgccgatcagttcggccggatcgtactccagaatcttgtggcaagagggcgacagatacagaaattcaccgttgaatgaaagcacatggatcacatcatcggtattctcaaccagaatgcggtccaggtagtgccggttgacatcattgccagctgcacccatggcgttgaggatgttagtcacttcgtcatggccatatcgcaacacgaggtctggtcgtgaggagcgcgcatcttgtggtggaactatatactgtggcagatgatcgcgctggtagtttatggtataattaccatctatccaatgttagtgagggcactcgccacgaggaatgcaaagcataccaggattccttcccctcacagcatcgggtttttcaaccagatcgacctgaaacccgacataataccgataaacatccgagtcccactggatggggatcatcgtgatgagattcatgaagggttgtccacccttgcggtagttaattatactggcctggatctcattgcgatcgtcgatggttgaccgcagccgatagacggtctgtccatcgacaaaggtccgcttggcaccagagttgattatgccgtcgggtgcttggagaaatcgacagttccggccaacgatttcatctttagtatagccggtcagtcgttcaaaggcctctgatacatagacgattggatgatcctcgaccaagatgtcacacatcacaaaggcacatgagagatcgaccgcgccaatgttgattttagggttgggtcgcatagccacacggccctgaataaggttaatatatcgtcggatactctccatggagatggaagacttaccaacgctcccagcacgtcaaagccagtcgttgaataaatgccggtatgttcagtcttgccaatatcgggctttgctagccccggcgcgaaatcctctggttgcacggtcccacgtcagtcataccatgggacggagctaagagggagttaccagacacagacacaactcacctttagtaacaacgggtttcttgggctggatagccaccggttgcgatggacggtacggctggccaacaggcaggcggcgctctggaggttgtcgctgcgcccgctgcacctgcaccggcgcctgcgcctgtgaccagtcgctcgtgcgacccgagaagtcggagtcctcgaaatttgctgttgagtcggtgcttgtatcatatcgttccttgggcgctggccgagcgggctcggaatattggggtagcggcataggttgtgggaaaggcggatatgcagactgaaactgtgaatgatccatctgcggaggcaaccccatgatagccgggtacgtggctgggatatcgtaggaataggcattggtagcattcgtattcattggcattgaaatacccgaggtcggaatcccgtcgtatgtgagcatggcattagacctcggtccctccaggtccgacggctgtgagcgtgcgaagttctggagcgggagatccgcatcctgggatagcatggcactgaaggcataattattctgattggaaaaggttgtatatggcggattggtgggttgtgagggaacctgatgttcgtcatcatagtccaagttgaagctgttcatgttggttaaaatatctgtggcccagaccgagttccatcgccccgcaggatgacaccctgggcaaaagtgagaattgccgtcgaaatatgcttgaaaattgtttatcaaaaggaatgttcgatatattagagagatggaggaggaggagactggcgagagggtgtgtgtgtgagagagaagagaagagaacttgatatctccaatgatgtggagaagtactcgccaatcttgatatatggggatttgccatccaggatttgtaggtgttggatcttgtttatttatgtattctttctgtttatgtttctgtttctgtttctgtttctgtttctatttccctttcttgattctatatctgtatctatatatatgctaaattgtaggttgtaggttgtagaaaggtgtcctgtatgaagtgtatgccatgccatgcgcaaaccctcacaatgacaatggcaatggcaatggtagactggaagagttactatagtatatagtattagctacagtcaaagatagagagctcccagggctatattatgtagtatatatatagagctagtatatattgcccctattatataaataaacccctgtcaacattccccatttcccctcctcactctttctccaataatgtccattggccatggacaagatctcaatcaccatctgcggagatggtggatgtggtatgttgcttctcttgtctcctgggaatttcctgactccgtgattcggtgccatgtttccgggtttcgcgcgatcgagatctgatcaaatcgggatgcaggcaaatcttcaatcacgatgcggctggtccgtagtcaatgggttcacgagtaaggatatctccctggtcttggaaacctagtgctaatatttcattgctagatatgatccaacaatcggtattgcgccattcccacgcccttccaatgcccttccacttctaatcgggcccagaggattcctactccgtcactcgcaccgtcgacggtcgcccctacgtcctttccatcaccgatactgcaggccaggaggagtaccgggggctatggtctgcctcgaccctgagttcagatgccttcctcctagtttacgatatcaccaacccgtcgagtcttgaaacgctggatcatttcatggagatgattgatatggaggcggaacagcgcgtcgaggacaaccagcaactgcgccagaggttggggaatcgatatgggggtctcggccacgtaggcatgccaccgccggtcaaagtcatcgcgggcaacaaatgcgatctcaaggacggtcgcgcggtgacatcccgcgacggactggcctatgcgcgcaagcatggctgcgggtttatggagaccagcgctcgcgagacagtcaacatcgaggagacttttgcccgtatgacacacggtctgtcaaccaagaaggagagagagagagctaacggtcggatagatttaatccgtcgcgttgtcgaagcccgccgactccaatgtcaacagggtgttcttcctcccagcgaaccatcgcacacggcgctcccgaccagcacggtggacgcagttgcagagaccaaatcccgtcgaagtcgggcgtgggagtttatcaaacaccggaagacaacggaaccaaacggcgaacagggtcaggaacagagtgaaatgcaaaacggaaccgaaaaagagaaggggccgggtcaagggtgcgaaccggatgaacggtgcgctcgtcaggtgtggtgttttcgctgttgatttgaattgcggagcgaagcgaagcaattgaaacagcaacgtatccattatgtatagtacctggcatctgtgggcaatgtgtatatttctgtgtcgtagcattggatcttggatcttgtatcttgtatcttgtagaggaacatgtacataaagttcggggtgaatagggtcaaagggtcaacgggccaggtcaaggatgaatggactcggaatgcgtctccgacaatcaactacgggatatgatgctgaatagagggagctcccatggacaaattgaagtctgaatttgatagatgatttcatagggattagatttagatcgtcacatatttccaaaagcagtaagtatttagctaagctttgtgaacggaaacccagccgagaagaaaagaaataggaggaaaataggagacgccagcaatcgaaacaggatatcattctagaagcgaggcctagcccttgctcacgcccaacagggacatagttccttattgggcgatcctcggaatggtcacgtcatggactcgaagggccatcaccttgacggatgacaattggtgatagtctgagaggcctatcatgaatcatggagatgacctcaggattgaatagaatacacagtttacagtaaatggatagaatgcagtctcgaagctattcggcatgggcttgccgatttaatgtccgctgacataggcagtataaggattgcatagttatgcaaactgaggatattcaccatgtacatctgttcttctactcttctaccgatgttggagatgttgtattctatatgctttcgatattcgaattctctctattcgaattctctcgctctgaggattctaccattctcccattctctataataataatcaatatccactcctatacgtcagaaacacttcccaaatgccgagtcatcctgtatttttcccgtaacacccccgtaccgtcatttatgatcttcgatccgatcccttttttatgtccagcgagactcgagactccagtgactctaagaagaaaagccagagaatattatttttataaaaataataatccgaaacgagtagggcccctcttttcgtgattcctatatatgcacatcgacgcccatggtgacctgggatgttacttttctttaagagtctattacttcactcgagcatcttcctagatcactactctcctctctctattatttctttaaaccttcttatatccacggtccccagcatttctctctctgcatccgtctactctattggaactcaatttctcttaatctgtgaacatcattatatcattgacattttgacgtcgatcatcctccctctcgaagtatagctaaggctcggattcctgttcttctctctacactttcgaccacaaatcatggcagctcgacaatcaacacccacctccgagcactcgcattcggatagtaatgtccgtaaaagagtatgcaaagcttgcgatcggtgtcgtttaaagaaatccaaggtatgtacagctaaacgaatcaaccctcccaacatccactgaccctccggacagtgtgacggatccagtccttgttcccggtgtcgtgccgataatgccatctgcgtctttggagagcgcaagaaggcacatgacaaagtgtacccgaaggggtaagcgacatcaaacagtcctagctcgaaactcctcccactgaccagctctctccttctagttacgtcgagatgcttgaacagcaacaatcttggctggtccatggcctccaggaactctatcgacgcaacatcgaaggcgaaggctggcccggcgagcagctgaaactcgaacccaacggtcacccactcacccacgaccttctcatgcgcctcggcgccctcgacggctccaagggcgagcgcttcgaagaaaaccccgaagccttacagcaggatctgtggcacaccaacgccggcatgcaacgccaggaatcgtccgacggtggctccgatagcccccagtcaccagtgccccgttcacgcttctcctccgatgctttctcccagcaacacatgccgcccacaccgcccacatatagtcccacgacgcgtgcgcccatcaagaccgagcagccttctcaatctcagatgcccagcaccccgcaattcacgcaacctttgtccatgcaaggcgtcgtcaacccactggcgttgcaaagtccgcagcagtggcctagtagcgggttcaattctttcgacgagatggacttgatgtccacggccgattactccaatatgccctttgacgaccagcagttgtcgtcgccgatgttcaatcgccaggtgcccttgagctgtttgtcgcaagggtcatatctcgattccaaggactatgacgatttcaaccagttcctcaatccgaaccccacagagatcacctcgatctgagcccttcttctaagctattttgagctatcctgagctatcttgcgccatcttgagctcaccctgagccttatcctttcaaggatcgactattttaacgccgtatgacgtgatgcatgtatactatacatgttctgtttttctttctcttctcttctggggctattttcccccgcaagttctgttgatcggattcaggcgcaattgggatcctaatcacctctgtacagtgaaccggttttcggagatttggagttattcttcttctattctctttcttctcttttttacactttgtttcctttctttctggcgttctaaaacggggtttcaaggagtcgtccatttattgtctaattagaattcaatgaagtttttaaggtcatgtcaccgttacaccatccgaaacgggaaatgatctcattcgacttgatatccacttagcagttacccaggtaccgttccagatcgaaaagatctacagaagtagcggagggagatgccgatttgctctagccctggagccctggatccctccatccttgccttaatccctggagggtcatggagttcgaacatcaatggagcaaacggcaataactcggaccttgatttggtattttattttctttttcgtatttttgatttttaataagattattgatcttccagctgactcagcggcccattccccactttgagcgattttcggatcctttttggctgcttacgtcagccattggcctgcgagagcccgcgaaaagtcgccgaatcccgatttttgccgttccggggcaaatgctccgacgccaaaatataaaaaatcgggactttggcctttggagatgagcatgttcatccttatttgaccgtggaacttatgttataaccttctggccaagccgtctccctcgtatacaacctgttcagtcacgaagtatatttgaacggccgaacacataaggccgagttatcgccaaacctgctttcgcaagaaaatgcctctcaatcccatgccaatccaacctaataccaacctaacgccaacccaatgctaaaactctattatatcctggtacctgccaatattaatatcaaacccttggcgtgtctccttttgttcttccgttcggtgggacacgagtccggggtatagatcccttcggacgccggacctcgttctctccgaacggatgcaggctgaccctaacgccgatgtgctatgtccgttctatgcgtgatatagtgtactgatctgattggagaataccagttcgatacacgttacggagtacgtagttggcttttttacctttgcgacaactgaggttatactttaaagtcgctcgccacaggtccagcccggtttgatatggattacggaagatgtcacgagttgagctttaccctaattgggtcatggccaaaatattcaaagccctctcttttagtctaatcaacctgaatccggaccctcttagacaaataaacacctctcaaagccttggatattaacatttatgctaaaccaaaataaaggagtcatgttgtcggtgcttgatcccgcagattgcggggttgctaacgtcatgtcgcttaaaaaatttagagtacatgctatgcccttctttccccgcctatctcatccttcgagagcaaatcacataaaaggaaccgcatcatgtccgaacaagctgctttccacttcctgcctttgggcgccatcatccaaaccttctccgtcggtggtaagaacatcgttctgaatttccctacgcaggaggactatgtcaagcacaataccccacactatggtgccaccatcggccgtgttgcaaaccgtatcaaggatggtctgattcaggagctaaatggccagaaggttcaactggtgcagaacaacggccctaattccctgcatggtggggagaacaattgggctaagcgcgtctttgacggcccattcaccgtccagcgcaatggtcacgatgccgtgcacttcaagtacctctgcagagatggttcggagggattccccgggaccatcgaggtgcgcgtgtggtacatcgctagcaacgaggacgccaagaccgtgctgacggccgagtacgaggtggaatttgttggcaacgagtacgaggtggaatttgttggcaacgagtgcgaggagactgtagttaatatcaccaaccacaggtagatctagccccttcccccttcaaagctgatgacgacattcaatcttgaaattggagctattccccgctgaccaagcttccccccacctctcacagctactttaacattggcgatggccccgatatttcaggcaccaccgcccagctcgctacagccgactatctgcccctcgatagcacgggcattccctcgggtgagatcgccaagttcccgcgggacgtgacagccccgttcgcgctcgccgcaaccggcgcacacttcgacgacgtctttgtgctcgagtccgatcctagcaaaatccccctggacactcgtggcttaccgctacgccgtctagcccagtttagcaatgcaagctcgggcctacatctcgaagtgtacagcaccgagcctgccttccaattctacactggcaagtacctcgatgtgccatcggtcaacggggcaccagcacatcatgaaggagctgcattctgtgtggaacctagtcggttcgtgaatgcgattaacgagcctgcgtggcggtccatggttctgctgaagaagggtcaactgtttggctgcaagactgtttacaaggcgtggaaggcctgaaggggcctaaaagaggatagcagtatggagtcctgggtacatcggtggatcttgagacatttttcagcattcaagtcaagaggagtggagatcgacctagccatgtatgtatctttgattactatacaaggaacctcggcattgtatagacattgtaatcccaaaagaattttaaaaaaataaaagaataaaaaataaaatgccgaagccgaccaagttatctccgtcgtcccgggtcctcggcagcccgtgtttccctttggaatttgagttcttcttgtatcagatgattctctgcgttcatatatgcgaacgtctctcttgtcacctaacgagatacctctatatacctaggagatatgtagtatgtgtagaggtataccaactcaaaacaattacccaattcgtgaccttcgtgacccgctctcttcgagaataatctcttctccactgtgaatgtcaagcccgtgacgatctatcttttttagtgtgccgcattcccggaatgtggcgctataagatactattagttttttttattcttattgttacggatataggatttgttttagggtttgcttatagttagctatattacgcgataatctacaacaatctcaataataggacacaaccatatggcctgttagcctgggcttactctttttgcgtagtttaatctatctgggtgtatgttgaatcactaattgactacatgtaactgactacatgtattatcgtatactcccacgtgacctcggccacaatcggactccggaccgggccaacccgagcttcttcaccccgcgcgggggaacttcgacatgcgaacacgcggatcaacacaacttctccaaataccttaatccaattcattattcaatctactccacttacaatggccctggctcacggagacctgcgccatctactacccggcaactacaagcgcttcatcacatcttggctggaagaggactgccctagtctggactatggcggttttgttgtcggcgagtcagagggcgaggcccgactactaggaaagagcaaggtaaagagacagtgtctataatagattttcctaatccccccccccccaagaaagaacattcactgatcaactcagggcatcgtcgcaggcgtaccattcttcgacgaggtattctcgcaactaggctgcacgtaagccataccccactccaatcccaccccacctctctaatccatccagaatcgaatggcacatcaaagaaggcgaagcaatcaccccaattcagcactgcgcaaccgtccgcggccccatccgcaagatcctcctcggcgagcgcgtagccctcaacattctcgcgcgttgctcaggcatcgccagcaagagcgcctccatgcttgctgcgctgcgcgcgcaaggatggcaaggtaccctggccggtacaaggaagacaacgcctgggttccggcttgttgagaaatacggaatgcttgcgggtggcgccgacccgcaccgccacgatttgagctccatgaccatgctaaaggacaaccacgtgtgggcgtgcgcgaacaaccgcgctgcagccgatggtggcgttgcggacccgtcatcgcttgagtctattgcggcggcgatcccgcgcgctgtgcaggcggccaaggcaactggtgggttctcgactaaggttgaggttgagtgtcggagtgtggaggaggctaatgcggcgattggggctggggccgatatcattatgttggataactttacgcctgagggtgtgcgggaggctgcggcgcagctgaagcgcgaatgggcttcgaagaggcctttcttgattgaggtgagtggtggattgacggaagagaatgcgccggcgtatgtatgtgccgatatcgatatcttgtctaccagctccatccaccagggtacggggattgtggatttctcgctcaaggtatcgttgcggtagaaatgtatcatcgaattttggatgcatcctaatagagcagcatatcgacgtgtataaagtacaacgaaagaagaataaaatgcacaaaaaactccgacagtccctcaacaaggtattttagccccgaataacattaaaataaaagcctttcctcatgagtgattattacaagcatatgcgataagtgtcacgtggaagagaaacacaaacagacagtgggtatatatagcataggaaaaaaaagcgcggcaaaatcaaacttcgatgtccacggtgatgccctccccttcactggagctgggagcctcatctgaacccggagggcgactgggacggttgccatctgcaatggtccctgaaggtcctcgccgcctacgttcccggttgagctgatctcgaagtttctgattctcagcatcgcgctcctcaagtcgctcgcgggcgccactgcgatctaggaggcgaccttcacgttcagatttgagttgcctctccagcccatgtagtctgtgaatccatttctcatcgctaccattccagccactttgcgagctgcgcgtgcgtggtatcattgttccaggattgttggccaacgtgctgctggaagaggaatgagagggctgccctgtaacgttgcgagtggcgcctttctcggcgcgaggtctatcagtaccagccgtagagctagaacgccctagggatcggtccgactctgctcttgacgtcaaagaaggggagcggggtcctgccatgactgcagccgcagccgcagccacagacgcaggaccctgtcctcgcgcgttggnnnnnnnnnnnnnnnnnnnnnnnnnnnnnnnnnnnnnnnnnnnnngcaaaagaggggggggggggtcctgccatgactgcagccgcagccgcagccacagacgcaggaccctgtcctcgcgagttggattgaagtaggttgagttcagcctttagcagacggttctcgccacgcaatttagacatctccggagtggaactcgattgtccgcgaccggatcgcatgtttttgaaagcctcttcgaggcgctcgagcttcttgattcgtccgttatatgacagctcaagcgtgtgataacgcttggtcaactcgtggtcgatgctcttgatgcgagacttgaaacccgccatcacagcctcgacagtcttcattgcaagcagaaggttgcggctgaagcctggccagaacagcatattaccaatgacctcctggctcgggagattgccattgataagactgttggagtgcgcccaatccggcccgcaaagcccagagattctcttccaaatgttaagaaacatgatgttcctctcgttgagctggtccttgaattgctgttccagcgatgcgtatcttttgcggtcctcggtccgcgctttttccagatctgtgatacgggaattgctttgtgtgatggtccgagatgcgtgctgatgagatttgagcgacgactcaaatgactgcttgtcggctcgacgcgcatgtctttcgcgatccaggagttctgagagttttcgtgactcaagcccatgactctcgagcagagcgtcacgatttcgaagcagagattctttctcatctagctgtgagcggacgctctctaactcaagggcggtggactcgagttccttttgcagcttcatgatgttggtgatcaagctagaccggctgccgctgagatcacctagcgtttccctcaaattgttttcgaggtccatcaaccgttctcgccaggtggaggtttcaatctcctgggctgaaaggctcttcttcagacgtcggacctcctctttggaagctgaagcttcgcggttcaattcattcatgatacgctggacatcttgcttctccttacttcctaccacctctcgctggtgacgttcatctgccagtcgctgctcgagttctctggtcttctctttttcactaaccaagctcaggtggtagtttttgaggtccgattcgagatctccgatgcggatcttatcgccgtcttgctcttcgcgaaggaaagcgatttcattttggctcgattcaatctgcaccgtcagccgctgcaccttagtgttggcctcaaataggctcttctccatagattccatctcgcgattggtctcttcaagttcctgctgcacagacttgtacgcggccaggttgttctgtgcatcttcctcgagacggatgatgccttcgctggcagaacgcatttcggcctgcaaagccctgaggttttcgtcttggtttctcaagtcctcattcatacgctggcactcaacaattttctggtcgagttcgtctccaagggtatccaactcttcctgcgcttcggcccgcaggtcctggaaagcggcatctctttcattcgccatgtttacggcctggtctcgttcttgctgtaggttttgcatctcttcttcggcttgatcaacatcagcttggtatgccttgtcaagagcctctagttctgcaatatagtcctcaagttcggctcggatggcttgattctcaagcttgagggtcgacactaagtcccggagttgtccattccgggcttcgagttcatcgtggtccatgtcgctgcgcgacatacccgttccgtcgctagcctgagacgaaggtcggacatgagtgcgcgaggcggaacggtcgaagatactgtctcccgctatggatcggccaacatgacgacgctctccgagcttcaattcttcaatctcctgataaagacgttccttttctcggttacgagatgtgagcattgaagtctgggcactgacttcttttcttagttctgcattctcctgtttaaggagccccagctctacaacaagcgtgctgttgggaacggtaggaactcggttgccatctctatcagatgtatatgaaaaagagtcgtattggccgggctttgtagcagcgtatatctcacttcgcaaacgaatcgactcatcccgaagtcttcgattttcttcctcggcttgctctcgcgctgaggtttctgcgtcaagcatatccttccacatctcctgtatatataattagctcgggtctgacttgatcgtgttcgtctcacttactcgctcttccctcgcgccggcgtcggactctcccgcacgattatcgctgagcgacctgatcatctcggccaaccgtctcttctcactttcccgtgcaatagtttctgacctcatacgctcaatctcgagttcataagtttcaacccgttcacgtaggaagacgatctcttcgtcttgggccgagtcacgatcgccatcctctgatccctcggggtcatgattgaccatggaatccttgtcggattgatgttctttcacttgcttttccaagtctcgaatcttgcgtcttaggctttgattgtcctttgagagcttgaccttatctgattttagctcaacattctccgagatcatctccttgatgccttcctcggatcgcttgttcaacgcctcattaagaaagtgaattcgcatttttaggtcaaaattctccttcgccaagcgatcaatggtgctgctctgttccttgagggtcaagttccgaccacttttcgcaaacgcaggggccgaggcacccaaacgcttctccggaagtgcttggaagtcttctcggaaccgttgtgcaaacgtggtaggaatttgaatgtccttagctcgctcggcaattgctgtatcagtaggattgctgtcttgtggcttcgctttgggtgtcatcggtgttgaggcgtcttcgtggtccacagggctgatacgggaatgtggtgagccttcctcctccagcgtatgtaggccgccgtccattggaccagacatgtttgctttgtcgagtgggttttcttcgctatacccggagattccagatgccatgctgccgagactggttgtcctagccatcttggcacggctttcagcgtgcatggttccatagttgtcagaagtcgcgcccccagtttgaagggcatagtccgcgcccagtgtggcatcgctgttggttgtttcggtgttgttactggcggctgatgagtgtgacgaacgattggttgattgtcggctagtcaggtacttgggtcggctagctctccgactaccagtaggactggtactctggtcattagataagtgcgacgcaccgggcgataggctgcgggaggtgtttcgaagcttcgagggggtaagttgcgattcgttctcggccatggaatattcaggtctgaagggacgctcatcttgggagagcgggctggtttctagtgcatttttggacaatgtggatcgagtttgtcgcagcgctgcagctaccgtaggtgacgaggagtgggagtaagacaaggtattgttcgcatgttgtcctgtagggccaggtgccgagtccaaattcgtacctggcttctccttctcggtgtgttcttcgtcttccaccgggattttatcggctggttctatgaatgagagctgtgaggagtcctgtattatgtctgcagtgccattcttcggaaccccaactaggtacgtatcatccgcgccagcagtaggaccggtcgcagccacgtcaattgttgagggttccggcagaaagctcgattcaatgtccataagtttgcgacgcatttcgtgctcttcaattagggtttggttattgtcgcgttcgtggtcgccattttcgctcgatggatggaatagactgctctcgtcgtggtcaaccgaggaaggaataaaactatgatcgttcaaatctaattgggtcgatgtcatggtaaattcagggtcttcatggtcttcatggtcttggtctccatgatccggctctgaaggagttgattgcgcgtattcagatggcgactgtgtgaccgagttcgggggaagaatccccggtgcgtcctctgccatgaagtactctgaactgaaatcattcaatgtctgatctggcgtctggaataccgacacagacgaagagcgcactgaaactggggagatgacgcccaatgtttggggatccactcgctggatctcgctacccgcctcgatcggcgaatgagcggtcattgtatttggatgtatgggaaaagttgagaaagttgagaaagtcgcgaagagatggatttgtagtgttcaaattaagtgaagatgaaggtctgacttgaattcgaacatacttgaaagtcatctggcaagagcatatggcacaggagtagacgaatagtgtggacacggccaggataatgtaatggtattgccacgcagtatatataacatattcattactgccacgcgcatatcactcgactatacaacaagcatcgagaatcgagaatcgaatcaacagaaatatacaaatcgatgacattcatatgtaaaaacgataatcatggtatccatagcatcacatcaccatcccaagcattaatcggaataatccacccataacagaacattaataggaaagaggtatactagacaaagttgtatcaaacaaaagtcacgaaaaaaaaaagagaaaaggaccaagatatcgggcccttttgaaaggtaggtatcatggagtttccccaagccagaaaaaaaagaagtatatacagccggttcattaaaaggcgaaaagagaaagagtgtgcaattacgctgcaacttccgtaggctcaatggttgcctcctcatccacttgggggtagttggttgaagcaagaattctctctttagagctgatggcgttgcgtagggagtcgatatacgtgcgaaacttaacaatctcacgtaacagatacgaagatttccgttcccagttggccatggctttagcggcgttggggtggcgtggagagaatgcaaggttcatcgcagaacgcagctcattgtggcgagagagatcatcttccacgttctgcacgtagccctgcagggccttcaactgttcctcctctgtcaggttggaggcgaccatgctttgctgtggtgggctccagtcactgatgttgacccgatccgcgggaagtcggggccgcacaccctgatgatccatggagcttcggatggagctttgaatacttggccgtgcgcctgacgaaggcggcggggatcgattttcaccgccgatcagcgcgctgttaatgacactgtcgctccatccatattcaatattgctgatgcctcctatcagtggttgcttggataatcgcgcgctccagtagttggccgtggagacaaattctcggacaatctcaggcgttccagcttggaagagatgaaccgccccagtgggcaaactcagggcccagacatgaggacgagacttggagtatccaggcgatggtaaggcactggcaatggtctggcgcagcatgaacttccaaagctcttctgcattttccgtccagttgccaccaccgactataacccctccgcgctgtttagacttttgtcgcattgacttggtggagttgttgaacgagaaaagacgcatccagccttgctgtataaccgcaaaacagtcattccagttccggtccttggcccgtttgtccaccgcgtctagatgatgcttgtgttttaggctcccctccttggcccacggggcgccggctagagctaacgtatcatcttcaagcagaggggtcgttcgctcgggctcctcgtagctgtataccgaggtagcagagtcctccctgatgatggcctgactcagagcattggcaaacccgatagattgttggtactcgccgcgagggaagtctgaaccaaaagagtctacagacgctgaagtaaacttgcctaaagaatatttactccaggtactggacccagtcggactccagacagattggtcgtctaggctggta
